United States Patent Application Publication US 2026/0258423 A1 - sequence listing, part 6

SEQ ID NO: 152909 - DNA, 20 bp, synthetic construct
  source 1..20: mol_type = other DNA
cacgccattctcctgcctca

SEQ ID NO: 152910 - DNA, 20 bp, synthetic construct
  source 1..20: mol_type = other DNA
tcacgccattctcctgcctc

SEQ ID NO: 152911 - DNA, 20 bp, synthetic construct
  source 1..20: mol_type = other DNA
ttcacgccattctcctgcct

SEQ ID NO: 152912 - DNA, 20 bp, synthetic construct
  source 1..20: mol_type = other DNA
gttcacgccattctcctgcc

SEQ ID NO: 152913 - DNA, 20 bp, synthetic construct
  source 1..20: mol_type = other DNA
ggttcacgccattctcctgc

SEQ ID NO: 152914 - DNA, 20 bp, synthetic construct
  source 1..20: mol_type = other DNA
gggttcacgccattctcctg

SEQ ID NO: 152915 - DNA, 20 bp, synthetic construct
  source 1..20: mol_type = other DNA
cgggttcacgccattctcct

SEQ ID NO: 152916 - DNA, 20 bp, synthetic construct
  source 1..20: mol_type = other DNA
ccgggttcacgccattctcc

SEQ ID NO: 152917 - DNA, 20 bp, synthetic construct
  source 1..20: mol_type = other DNA
cccgggttcacgccattctc

SEQ ID NO: 152918 - DNA, 20 bp, synthetic construct
  source 1..20: mol_type = other DNA
tcccgggttcacgccattct

SEQ ID NO: 152919 - DNA, 20 bp, synthetic construct
  source 1..20: mol_type = other DNA
ctcccgggttcacgccattc

SEQ ID NO: 152920 - DNA, 20 bp, synthetic construct
  source 1..20: mol_type = other DNA
cctcccgggttcacgccatt

SEQ ID NO: 152921 - DNA, 20 bp, synthetic construct
  source 1..20: mol_type = other DNA
gcctcccgggttcacgccat

SEQ ID NO: 152922 - DNA, 20 bp, synthetic construct
  source 1..20: mol_type = other DNA
cgcctcccgggttcacgcca

SEQ ID NO: 152923 - DNA, 20 bp, synthetic construct
  source 1..20: mol_type = other DNA
ccgcctcccgggttcacgcc

SEQ ID NO: 152924 - DNA, 20 bp, synthetic construct
  source 1..20: mol_type = other DNA
tccgcctcccgggttcacgc

SEQ ID NO: 152925 - DNA, 20 bp, synthetic construct
  source 1..20: mol_type = other DNA
ctccgcctcccgggttcacg

SEQ ID NO: 152926 - DNA, 20 bp, synthetic construct
  source 1..20: mol_type = other DNA
gctccgcctcccgggttcac

SEQ ID NO: 152927 - DNA, 20 bp, synthetic construct
  source 1..20: mol_type = other DNA
agctccgcctcccgggttca

SEQ ID NO: 152928 - DNA, 20 bp, synthetic construct
  source 1..20: mol_type = other DNA
aagctccgcctcccgggttc

SEQ ID NO: 152929 - DNA, 20 bp, synthetic construct
  source 1..20: mol_type = other DNA
caagctccgcctcccgggtt

SEQ ID NO: 152930 - DNA, 20 bp, synthetic construct
  source 1..20: mol_type = other DNA
gcaagctccgcctcccgggt

SEQ ID NO: 152931 - DNA, 20 bp, synthetic construct
  source 1..20: mol_type = other DNA
tgcaagctccgcctcccggg

SEQ ID NO: 152932 - DNA, 20 bp, synthetic construct
  source 1..20: mol_type = other DNA
ctgcaagctccgcctcccgg

SEQ ID NO: 152933 - DNA, 20 bp, synthetic construct
  source 1..20: mol_type = other DNA
actgcaagctccgcctcccg

SEQ ID NO: 152934 - DNA, 20 bp, synthetic construct
  source 1..20: mol_type = other DNA
cactgcaagctccgcctccc

SEQ ID NO: 152935 - DNA, 20 bp, synthetic construct
  source 1..20: mol_type = other DNA
tcactgcaagctccgcctcc

SEQ ID NO: 152936 - DNA, 20 bp, synthetic construct
  source 1..20: mol_type = other DNA
ctcactgcaagctccgcctc

SEQ ID NO: 152937 - DNA, 20 bp, synthetic construct
  source 1..20: mol_type = other DNA
gctcactgcaagctccgcct

SEQ ID NO: 152938 - DNA, 20 bp, synthetic construct
  source 1..20: mol_type = other DNA
agctcactgcaagctccgcc

SEQ ID NO: 152939 - DNA, 20 bp, synthetic construct
  source 1..20: mol_type = other DNA
cagctcactgcaagctccgc

SEQ ID NO: 152940 - DNA, 20 bp, synthetic construct
  source 1..20: mol_type = other DNA
tcagctcactgcaagctccg

SEQ ID NO: 152941 - DNA, 20 bp, synthetic construct
  source 1..20: mol_type = other DNA
ctcagctcactgcaagctcc

SEQ ID NO: 152942 - DNA, 20 bp, synthetic construct
  source 1..20: mol_type = other DNA
tctcagctcactgcaagctc

SEQ ID NO: 152943 - DNA, 20 bp, synthetic construct
  source 1..20: mol_type = other DNA
atctcagctcactgcaagct

SEQ ID NO: 152944 - DNA, 20 bp, synthetic construct
  source 1..20: mol_type = other DNA
gatctcagctcactgcaagc

SEQ ID NO: 152945 - DNA, 20 bp, synthetic construct
  source 1..20: mol_type = other DNA
tgatctcagctcactgcaag

SEQ ID NO: 152946 - DNA, 20 bp, synthetic construct
  source 1..20: mol_type = other DNA
atgatctcagctcactgcaa

SEQ ID NO: 152947 - DNA, 20 bp, synthetic construct
  source 1..20: mol_type = other DNA
catgatctcagctcactgca

SEQ ID NO: 152948 - DNA, 20 bp, synthetic construct
  source 1..20: mol_type = other DNA
gcatgatctcagctcactgc

SEQ ID NO: 152949 - DNA, 20 bp, synthetic construct
  source 1..20: mol_type = other DNA
ggcatgatctcagctcactg

SEQ ID NO: 152950 - DNA, 20 bp, synthetic construct
  source 1..20: mol_type = other DNA
tggcatgatctcagctcact

SEQ ID NO: 152951 - DNA, 20 bp, synthetic construct
  source 1..20: mol_type = other DNA
gtggcatgatctcagctcac

SEQ ID NO: 152952 - DNA, 20 bp, synthetic construct
  source 1..20: mol_type = other DNA
agtggcatgatctcagctca

SEQ ID NO: 152953 - DNA, 20 bp, synthetic construct
  source 1..20: mol_type = other DNA
cagtggcatgatctcagctc

SEQ ID NO: 152954 - DNA, 20 bp, synthetic construct
  source 1..20: mol_type = other DNA
gcagtggcatgatctcagct

SEQ ID NO: 152955 - DNA, 20 bp, synthetic construct
  source 1..20: mol_type = other DNA
tgcagtggcatgatctcagc

SEQ ID NO: 152956 - DNA, 20 bp, synthetic construct
  source 1..20: mol_type = other DNA
gtgcagtggcatgatctcag

SEQ ID NO: 152957 - DNA, 20 bp, synthetic construct
  source 1..20: mol_type = other DNA
agtgcagtggcatgatctca

SEQ ID NO: 152958 - DNA, 20 bp, synthetic construct
  source 1..20: mol_type = other DNA
gagtgcagtggcatgatctc

SEQ ID NO: 152959 - DNA, 20 bp, synthetic construct
  source 1..20: mol_type = other DNA
ggagtgcagtggcatgatct

SEQ ID NO: 152960 - DNA, 20 bp, synthetic construct
  source 1..20: mol_type = other DNA
tggagtgcagtggcatgatc

SEQ ID NO: 152961 - DNA, 20 bp, synthetic construct
  source 1..20: mol_type = other DNA
ctggagtgcagtggcatgat

SEQ ID NO: 152962 - DNA, 20 bp, synthetic construct
  source 1..20: mol_type = other DNA
gctggagtgcagtggcatga

SEQ ID NO: 152963 - DNA, 20 bp, synthetic construct
  source 1..20: mol_type = other DNA
ggctggagtgcagtggcatg

SEQ ID NO: 152964 - DNA, 20 bp, synthetic construct
  source 1..20: mol_type = other DNA
aggctggagtgcagtggcat

SEQ ID NO: 152965 - DNA, 20 bp, synthetic construct
  source 1..20: mol_type = other DNA
caggctggagtgcagtggca

SEQ ID NO: 152966 - DNA, 20 bp, synthetic construct
  source 1..20: mol_type = other DNA
ccaggctggagtgcagtggc

SEQ ID NO: 152967 - DNA, 20 bp, synthetic construct
  source 1..20: mol_type = other DNA
cccaggctggagtgcagtgg

SEQ ID NO: 152968 - DNA, 20 bp, synthetic construct
  source 1..20: mol_type = other DNA
gcccaggctggagtgcagtg

SEQ ID NO: 152969 - DNA, 20 bp, synthetic construct
  source 1..20: mol_type = other DNA
cgcccaggctggagtgcagt

SEQ ID NO: 152970 - DNA, 20 bp, synthetic construct
  source 1..20: mol_type = other DNA
tcgcccaggctggagtgcag

SEQ ID NO: 152971 - DNA, 20 bp, synthetic construct
  source 1..20: mol_type = other DNA
gtcgcccaggctggagtgca

SEQ ID NO: 152972 - DNA, 20 bp, synthetic construct
  source 1..20: mol_type = other DNA
tgtcgcccaggctggagtgc

SEQ ID NO: 152973 - DNA, 20 bp, synthetic construct
  source 1..20: mol_type = other DNA
ctgtcgcccaggctggagtg

SEQ ID NO: 152974 - DNA, 20 bp, synthetic construct
  source 1..20: mol_type = other DNA
tctgtcgcccaggctggagt

SEQ ID NO: 152975 - DNA, 20 bp, synthetic construct
  source 1..20: mol_type = other DNA
ctctgtcgcccaggctggag

SEQ ID NO: 152976 - DNA, 20 bp, synthetic construct
  source 1..20: mol_type = other DNA
gctctgtcgcccaggctgga

SEQ ID NO: 152977 - DNA, 20 bp, synthetic construct
  source 1..20: mol_type = other DNA
cgctctgtcgcccaggctgg

SEQ ID NO: 152978 - DNA, 20 bp, synthetic construct
  source 1..20: mol_type = other DNA
tcgctctgtcgcccaggctg

SEQ ID NO: 152979 - DNA, 20 bp, synthetic construct
  source 1..20: mol_type = other DNA
ctcgctctgtcgcccaggct

SEQ ID NO: 152980 - DNA, 20 bp, synthetic construct
  source 1..20: mol_type = other DNA
tctcgctctgtcgcccaggc

SEQ ID NO: 152981 - DNA, 20 bp, synthetic construct
  source 1..20: mol_type = other DNA
gtctcgctctgtcgcccagg

SEQ ID NO: 152982 - DNA, 20 bp, synthetic construct
  source 1..20: mol_type = other DNA
agtctcgctctgtcgcccag

SEQ ID NO: 152983 - DNA, 20 bp, synthetic construct
  source 1..20: mol_type = other DNA
gagtctcgctctgtcgccca

SEQ ID NO: 152984 - DNA, 20 bp, synthetic construct
  source 1..20: mol_type = other DNA
agagtctcgctctgtcgccc

SEQ ID NO: 152985 - DNA, 20 bp, synthetic construct
  source 1..20: mol_type = other DNA
aagagtctcgctctgtcgcc

SEQ ID NO: 152986 - DNA, 20 bp, synthetic construct
  source 1..20: mol_type = other DNA
caagagtctcgctctgtcgc

SEQ ID NO: 152987 - DNA, 20 bp, synthetic construct
  source 1..20: mol_type = other DNA
acaagagtctcgctctgtcg

SEQ ID NO: 152988 - DNA, 20 bp, synthetic construct
  source 1..20: mol_type = other DNA
gacaagagtctcgctctgtc

SEQ ID NO: 152989 - DNA, 20 bp, synthetic construct
  source 1..20: mol_type = other DNA
agacaagagtctcgctctgt

SEQ ID NO: 152990 - DNA, 20 bp, synthetic construct
  source 1..20: mol_type = other DNA
gagacaagagtctcgctctg

SEQ ID NO: 152991 - DNA, 20 bp, synthetic construct
  source 1..20: mol_type = other DNA
tgagacaagagtctcgctct

SEQ ID NO: 152992 - DNA, 20 bp, synthetic construct
  source 1..20: mol_type = other DNA
ttgagacaagagtctcgctc

SEQ ID NO: 152993 - DNA, 20 bp, synthetic construct
  source 1..20: mol_type = other DNA
tttgagacaagagtctcgct

SEQ ID NO: 152994 - DNA, 20 bp, synthetic construct
  source 1..20: mol_type = other DNA
ttttgagacaagagtctcgc

SEQ ID NO: 152995 - DNA, 20 bp, synthetic construct
  source 1..20: mol_type = other DNA
attttgagacaagagtctcg

SEQ ID NO: 152996 - DNA, 20 bp, synthetic construct
  source 1..20: mol_type = other DNA
tattttgagacaagagtctc

SEQ ID NO: 152997 - DNA, 20 bp, synthetic construct
  source 1..20: mol_type = other DNA
ttattttgagacaagagtct

SEQ ID NO: 152998 - DNA, 20 bp, synthetic construct
  source 1..20: mol_type = other DNA
tttattttgagacaagagtc

SEQ ID NO: 152999 - DNA, 20 bp, synthetic construct
  source 1..20: mol_type = other DNA
ttttattttgagacaagagt

SEQ ID NO: 153000 - DNA, 20 bp, synthetic construct
  source 1..20: mol_type = other DNA
tttttattttgagacaagag

SEQ ID NO: 153001 - DNA, 20 bp, synthetic construct
  source 1..20: mol_type = other DNA
ttttttattttgagacaaga

SEQ ID NO: 153002 - DNA, 20 bp, synthetic construct
  source 1..20: mol_type = other DNA
gttttttattttgagacaag

SEQ ID NO: 153003 - DNA, 20 bp, synthetic construct
  source 1..20: mol_type = other DNA
cgttttttattttgagacaa

SEQ ID NO: 153004 - DNA, 20 bp, synthetic construct
  source 1..20: mol_type = other DNA
acgttttttattttgagaca

SEQ ID NO: 153005 - DNA, 20 bp, synthetic construct
  source 1..20: mol_type = other DNA
aacgttttttattttgagac

SEQ ID NO: 153006 - DNA, 20 bp, synthetic construct
  source 1..20: mol_type = other DNA
aaacgttttttattttgaga

SEQ ID NO: 153007 - DNA, 20 bp, synthetic construct
  source 1..20: mol_type = other DNA
taaacgttttttattttgag

SEQ ID NO: 153008 - DNA, 20 bp, synthetic construct
  source 1..20: mol_type = other DNA
gtaaacgttttttattttga

SEQ ID NO: 153009 - DNA, 20 bp, synthetic construct
  source 1..20: mol_type = other DNA
tgtaaacgttttttattttg

SEQ ID NO: 153010 - DNA, 20 bp, synthetic construct
  source 1..20: mol_type = other DNA
atgtaaacgttttttatttt

SEQ ID NO: 153011 - DNA, 20 bp, synthetic construct
  source 1..20: mol_type = other DNA
catgtaaacgttttttattt

SEQ ID NO: 153012 - DNA, 20 bp, synthetic construct
  source 1..20: mol_type = other DNA
acatgtaaacgttttttatt

SEQ ID NO: 153013 - DNA, 20 bp, synthetic construct
  source 1..20: mol_type = other DNA
tacatgtaaacgttttttat

SEQ ID NO: 153014 - DNA, 20 bp, synthetic construct
  source 1..20: mol_type = other DNA
gtacatgtaaacgtttttta

SEQ ID NO: 153015 - DNA, 20 bp, synthetic construct
  source 1..20: mol_type = other DNA
tgtacatgtaaacgtttttt

SEQ ID NO: 153016 - DNA, 20 bp, synthetic construct
  source 1..20: mol_type = other DNA
atgtacatgtaaacgttttt

SEQ ID NO: 153017 - DNA, 20 bp, synthetic construct
  source 1..20: mol_type = other DNA
catgtacatgtaaacgtttt

SEQ ID NO: 153018 - DNA, 20 bp, synthetic construct
  source 1..20: mol_type = other DNA
acatgtacatgtaaacgttt

SEQ ID NO: 153019 - DNA, 20 bp, synthetic construct
  source 1..20: mol_type = other DNA
tacatgtacatgtaaacgtt

SEQ ID NO: 153020 - DNA, 20 bp, synthetic construct
  source 1..20: mol_type = other DNA
atacatgtacatgtaaacgt

SEQ ID NO: 153021 - DNA, 20 bp, synthetic construct
  source 1..20: mol_type = other DNA
tatacatgtacatgtaaacg

SEQ ID NO: 153022 - DNA, 20 bp, synthetic construct
  source 1..20: mol_type = other DNA
atatacatgtacatgtaaac

SEQ ID NO: 153023 - DNA, 20 bp, synthetic construct
  source 1..20: mol_type = other DNA
aatatacatgtacatgtaaa

SEQ ID NO: 153024 - DNA, 20 bp, synthetic construct
  source 1..20: mol_type = other DNA
gaatatacatgtacatgtaa

SEQ ID NO: 153025 - DNA, 20 bp, synthetic construct
  source 1..20: mol_type = other DNA
tgaatatacatgtacatgta

SEQ ID NO: 153026 - DNA, 20 bp, synthetic construct
  source 1..20: mol_type = other DNA
ttgaatatacatgtacatgt

SEQ ID NO: 153027 - DNA, 20 bp, synthetic construct
  source 1..20: mol_type = other DNA
gttgaatatacatgtacatg

SEQ ID NO: 153028 - DNA, 20 bp, synthetic construct
  source 1..20: mol_type = other DNA
tgttgaatatacatgtacat

SEQ ID NO: 153029 - DNA, 20 bp, synthetic construct
  source 1..20: mol_type = other DNA
atgttgaatatacatgtaca

SEQ ID NO: 153030 - DNA, 20 bp, synthetic construct
  source 1..20: mol_type = other DNA
catgttgaatatacatgtac

SEQ ID NO: 153031 - DNA, 20 bp, synthetic construct
  source 1..20: mol_type = other DNA
acatgttgaatatacatgta

SEQ ID NO: 153032 - DNA, 20 bp, synthetic construct
  source 1..20: mol_type = other DNA
tacatgttgaatatacatgt

SEQ ID NO: 153033 - DNA, 20 bp, synthetic construct
  source 1..20: mol_type = other DNA
gtacatgttgaatatacatg

SEQ ID NO: 153034 - DNA, 20 bp, synthetic construct
  source 1..20: mol_type = other DNA
tgtacatgttgaatatacat

SEQ ID NO: 153035 - DNA, 20 bp, synthetic construct
  source 1..20: mol_type = other DNA
ttgtacatgttgaatataca

SEQ ID NO: 153036 - DNA, 20 bp, synthetic construct
  source 1..20: mol_type = other DNA
tttgtacatgttgaatatac

SEQ ID NO: 153037 - DNA, 20 bp, synthetic construct
  source 1..20: mol_type = other DNA
atttgtacatgttgaatata

SEQ ID NO: 153038 - DNA, 20 bp, synthetic construct
  source 1..20: mol_type = other DNA
tatttgtacatgttgaatat

SEQ ID NO: 153039 - DNA, 20 bp, synthetic construct
  source 1..20: mol_type = other DNA
atatttgtacatgttgaata

SEQ ID NO: 153040 - DNA, 20 bp, synthetic construct
  source 1..20: mol_type = other DNA
tatatttgtacatgttgaat

SEQ ID NO: 153041 - DNA, 20 bp, synthetic construct
  source 1..20: mol_type = other DNA
ttatatttgtacatgttgaa

SEQ ID NO: 153042 - DNA, 20 bp, synthetic construct
  source 1..20: mol_type = other DNA
gttatatttgtacatgttga

SEQ ID NO: 153043 - DNA, 20 bp, synthetic construct
  source 1..20: mol_type = other DNA
ggttatatttgtacatgttg

SEQ ID NO: 153044 - DNA, 20 bp, synthetic construct
  source 1..20: mol_type = other DNA
aggttatatttgtacatgtt

SEQ ID NO: 153045 - DNA, 20 bp, synthetic construct
  source 1..20: mol_type = other DNA
taggttatatttgtacatgt

SEQ ID NO: 153046 - DNA, 20 bp, synthetic construct
  source 1..20: mol_type = other DNA
ataggttatatttgtacatg

SEQ ID NO: 153047 - DNA, 20 bp, synthetic construct
  source 1..20: mol_type = other DNA
aataggttatatttgtacat

SEQ ID NO: 153048 - DNA, 20 bp, synthetic construct
  source 1..20: mol_type = other DNA
gaataggttatatttgtaca

SEQ ID NO: 153049 - DNA, 20 bp, synthetic construct
  source 1..20: mol_type = other DNA
tgaataggttatatttgtac

SEQ ID NO: 153050 - DNA, 20 bp, synthetic construct
  source 1..20: mol_type = other DNA
ttgaataggttatatttgta

SEQ ID NO: 153051 - DNA, 20 bp, synthetic construct
  source 1..20: mol_type = other DNA
tttgaataggttatatttgt

SEQ ID NO: 153052 - DNA, 20 bp, synthetic construct
  source 1..20: mol_type = other DNA
ttttgaataggttatatttg

SEQ ID NO: 153053 - DNA, 20 bp, synthetic construct
  source 1..20: mol_type = other DNA
cttttgaataggttatattt

SEQ ID NO: 153054 - DNA, 20 bp, synthetic construct
  source 1..20: mol_type = other DNA
acttttgaataggttatatt

SEQ ID NO: 153055 - DNA, 20 bp, synthetic construct
  source 1..20: mol_type = other DNA
tacttttgaataggttatat

SEQ ID NO: 153056 - DNA, 20 bp, synthetic construct
  source 1..20: mol_type = other DNA
atacttttgaataggttata

SEQ ID NO: 153057 - DNA, 20 bp, synthetic construct
  source 1..20: mol_type = other DNA
aatacttttgaataggttat

SEQ ID NO: 153058 - DNA, 20 bp, synthetic construct
  source 1..20: mol_type = other DNA
aaatacttttgaataggtta

SEQ ID NO: 153059 - DNA, 20 bp, synthetic construct
  source 1..20: mol_type = other DNA
taaatacttttgaataggtt

SEQ ID NO: 153060 - DNA, 20 bp, synthetic construct
  source 1..20: mol_type = other DNA
gtaaatacttttgaataggt

SEQ ID NO: 153061 - DNA, 20 bp, synthetic construct
  source 1..20: mol_type = other DNA
agtaaatacttttgaatagg

SEQ ID NO: 153062 - DNA, 20 bp, synthetic construct
  source 1..20: mol_type = other DNA
tagtaaatacttttgaatag

SEQ ID NO: 153063 - DNA, 20 bp, synthetic construct
  source 1..20: mol_type = other DNA
gtagtaaatacttttgaata

SEQ ID NO: 153064 - DNA, 20 bp, synthetic construct
  source 1..20: mol_type = other DNA
tgtagtaaatacttttgaat

SEQ ID NO: 153065 - DNA, 20 bp, synthetic construct
  source 1..20: mol_type = other DNA
atgtagtaaatacttttgaa

SEQ ID NO: 153066 - DNA, 20 bp, synthetic construct
  source 1..20: mol_type = other DNA
tatgtagtaaatacttttga

SEQ ID NO: 153067 - DNA, 20 bp, synthetic construct
  source 1..20: mol_type = other DNA
ttatgtagtaaatacttttg

SEQ ID NO: 153068 - DNA, 20 bp, synthetic construct
  source 1..20: mol_type = other DNA
tttatgtagtaaatactttt

SEQ ID NO: 153069 - DNA, 20 bp, synthetic construct
  source 1..20: mol_type = other DNA
atttatgtagtaaatacttt

SEQ ID NO: 153070 - DNA, 20 bp, synthetic construct
  source 1..20: mol_type = other DNA
tatttatgtagtaaatactt

SEQ ID NO: 153071 - DNA, 20 bp, synthetic construct
  source 1..20: mol_type = other DNA
ctatttatgtagtaaatact

SEQ ID NO: 153072 - DNA, 20 bp, synthetic construct
  source 1..20: mol_type = other DNA
cctatttatgtagtaaatac

SEQ ID NO: 153073 - DNA, 20 bp, synthetic construct
  source 1..20: mol_type = other DNA
acctatttatgtagtaaata

SEQ ID NO: 153074 - DNA, 20 bp, synthetic construct
  source 1..20: mol_type = other DNA
tacctatttatgtagtaaat

SEQ ID NO: 153075 - DNA, 20 bp, synthetic construct
  source 1..20: mol_type = other DNA
gtacctatttatgtagtaaa

SEQ ID NO: 153076 - DNA, 20 bp, synthetic construct
  source 1..20: mol_type = other DNA
agtacctatttatgtagtaa

SEQ ID NO: 153077 - DNA, 20 bp, synthetic construct
  source 1..20: mol_type = other DNA
aagtacctatttatgtagta

SEQ ID NO: 153078 - DNA, 20 bp, synthetic construct
  source 1..20: mol_type = other DNA
taagtacctatttatgtagt

SEQ ID NO: 153079 - DNA, 20 bp, synthetic construct
  source 1..20: mol_type = other DNA
gtaagtacctatttatgtag

SEQ ID NO: 153080 - DNA, 20 bp, synthetic construct
  source 1..20: mol_type = other DNA
tgtaagtacctatttatgta

SEQ ID NO: 153081 - DNA, 20 bp, synthetic construct
  source 1..20: mol_type = other DNA
atgtaagtacctatttatgt

SEQ ID NO: 153082 - DNA, 20 bp, synthetic construct
  source 1..20: mol_type = other DNA
aatgtaagtacctatttatg

SEQ ID NO: 153083 - DNA, 20 bp, synthetic construct
  source 1..20: mol_type = other DNA
taatgtaagtacctatttat

SEQ ID NO: 153084 - DNA, 20 bp, synthetic construct
  source 1..20: mol_type = other DNA
gtaatgtaagtacctattta

SEQ ID NO: 153085 - DNA, 20 bp, synthetic construct
  source 1..20: mol_type = other DNA
ggtaatgtaagtacctattt

SEQ ID NO: 153086 - DNA, 20 bp, synthetic construct
  source 1..20: mol_type = other DNA
aggtaatgtaagtacctatt

SEQ ID NO: 153087 - DNA, 20 bp, synthetic construct
  source 1..20: mol_type = other DNA
taggtaatgtaagtacctat

SEQ ID NO: 153088 - DNA, 20 bp, synthetic construct
  source 1..20: mol_type = other DNA
ataggtaatgtaagtaccta

SEQ ID NO: 153089 - DNA, 20 bp, synthetic construct
  source 1..20: mol_type = other DNA
aataggtaatgtaagtacct

SEQ ID NO: 153090 - DNA, 20 bp, synthetic construct
  source 1..20: mol_type = other DNA
aaataggtaatgtaagtacc

SEQ ID NO: 153091 - DNA, 20 bp, synthetic construct
  source 1..20: mol_type = other DNA
taaataggtaatgtaagtac

SEQ ID NO: 153092 - DNA, 20 bp, synthetic construct
  source 1..20: mol_type = other DNA
gtaaataggtaatgtaagta

SEQ ID NO: 153093 - DNA, 20 bp, synthetic construct
  source 1..20: mol_type = other DNA
agtaaataggtaatgtaagt

SEQ ID NO: 153094 - DNA, 20 bp, synthetic construct
  source 1..20: mol_type = other DNA
cagtaaataggtaatgtaag

SEQ ID NO: 153095 - DNA, 20 bp, synthetic construct
  source 1..20: mol_type = other DNA
acagtaaataggtaatgtaa

SEQ ID NO: 153096 - DNA, 20 bp, synthetic construct
  source 1..20: mol_type = other DNA
tacagtaaataggtaatgta

SEQ ID NO: 153097 - DNA, 20 bp, synthetic construct
  source 1..20: mol_type = other DNA
ttacagtaaataggtaatgt

SEQ ID NO: 153098 - DNA, 20 bp, synthetic construct
  source 1..20: mol_type = other DNA
attacagtaaataggtaatg

SEQ ID NO: 153099 - DNA, 20 bp, synthetic construct
  source 1..20: mol_type = other DNA
tattacagtaaataggtaat

SEQ ID NO: 153100 - DNA, 20 bp, synthetic construct
  source 1..20: mol_type = other DNA
ctattacagtaaataggtaa

SEQ ID NO: 153101 - DNA, 20 bp, synthetic construct
  source 1..20: mol_type = other DNA
actattacagtaaataggta

SEQ ID NO: 153102 - DNA, 20 bp, synthetic construct
  source 1..20: mol_type = other DNA
gactattacagtaaataggt

SEQ ID NO: 153103 - DNA, 20 bp, synthetic construct
  source 1..20: mol_type = other DNA
tgactattacagtaaatagg

SEQ ID NO: 153104 - DNA, 20 bp, synthetic construct
  source 1..20: mol_type = other DNA
ttgactattacagtaaatag

SEQ ID NO: 153105 - DNA, 20 bp, synthetic construct
  source 1..20: mol_type = other DNA
tttgactattacagtaaata

SEQ ID NO: 153106 - DNA, 20 bp, synthetic construct
  source 1..20: mol_type = other DNA
ctttgactattacagtaaat

SEQ ID NO: 153107 - DNA, 20 bp, synthetic construct
  source 1..20: mol_type = other DNA
gctttgactattacagtaaa

SEQ ID NO: 153108 - DNA, 20 bp, synthetic construct
  source 1..20: mol_type = other DNA
ggctttgactattacagtaa

SEQ ID NO: 153109 - DNA, 20 bp, synthetic construct
  source 1..20: mol_type = other DNA
aggctttgactattacagta

SEQ ID NO: 153110 - DNA, 20 bp, synthetic construct
  source 1..20: mol_type = other DNA
taggctttgactattacagt

SEQ ID NO: 153111 - DNA, 20 bp, synthetic construct
  source 1..20: mol_type = other DNA
ataggctttgactattacag

SEQ ID NO: 153112 - DNA, 20 bp, synthetic construct
  source 1..20: mol_type = other DNA
cataggctttgactattaca

SEQ ID NO: 153113 - DNA, 20 bp, synthetic construct
  source 1..20: mol_type = other DNA
tcataggctttgactattac

SEQ ID NO: 153114 - DNA, 20 bp, synthetic construct
  source 1..20: mol_type = other DNA
ttcataggctttgactatta

SEQ ID NO: 153115 - DNA, 20 bp, synthetic construct
  source 1..20: mol_type = other DNA
cttcataggctttgactatt

SEQ ID NO: 153116 - DNA, 20 bp, synthetic construct
  source 1..20: mol_type = other DNA
acttcataggctttgactat

SEQ ID NO: 153117 - DNA, 20 bp, synthetic construct
  source 1..20: mol_type = other DNA
tacttcataggctttgacta

SEQ ID NO: 153118 - DNA, 20 bp, synthetic construct
  source 1..20: mol_type = other DNA
atacttcataggctttgact

SEQ ID NO: 153119 - DNA, 20 bp, synthetic construct
  source 1..20: mol_type = other DNA
gatacttcataggctttgac

SEQ ID NO: 153120 - DNA, 20 bp, synthetic construct
  source 1..20: mol_type = other DNA
agatacttcataggctttga

SEQ ID NO: 153121 - DNA, 20 bp, synthetic construct
  source 1..20: mol_type = other DNA
tagatacttcataggctttg

SEQ ID NO: 153122 - DNA, 20 bp, synthetic construct
  source 1..20: mol_type = other DNA
ttagatacttcataggcttt

SEQ ID NO: 153123 - DNA, 20 bp, synthetic construct
  source 1..20: mol_type = other DNA
gttagatacttcataggctt

SEQ ID NO: 153124 - DNA, 20 bp, synthetic construct
  source 1..20: mol_type = other DNA
tgttagatacttcataggct

SEQ ID NO: 153125 - DNA, 20 bp, synthetic construct
  source 1..20: mol_type = other DNA
gtgttagatacttcataggc

SEQ ID NO: 153126 - DNA, 20 bp, synthetic construct
  source 1..20: mol_type = other DNA
agtgttagatacttcatagg

SEQ ID NO: 153127 - DNA, 20 bp, synthetic construct
  source 1..20: mol_type = other DNA
cagtgttagatacttcatag

SEQ ID NO: 153128 - DNA, 20 bp, synthetic construct
  source 1..20: mol_type = other DNA
tcagtgttagatacttcata

SEQ ID NO: 153129 - DNA, 20 bp, synthetic construct
  source 1..20: mol_type = other DNA
atcagtgttagatacttcat

SEQ ID NO: 153130 - DNA, 20 bp, synthetic construct
  source 1..20: mol_type = other DNA
catcagtgttagatacttca

SEQ ID NO: 153131 - DNA, 20 bp, synthetic construct
  source 1..20: mol_type = other DNA
acatcagtgttagatacttc

SEQ ID NO: 153132 - DNA, 20 bp, synthetic construct
  source 1..20: mol_type = other DNA
cacatcagtgttagatactt

SEQ ID NO: 153133 - DNA, 20 bp, synthetic construct
  source 1..20: mol_type = other DNA
acacatcagtgttagatact

SEQ ID NO: 153134 - DNA, 20 bp, synthetic construct
  source 1..20: mol_type = other DNA
tacacatcagtgttagatac

SEQ ID NO: 153135 - DNA, 20 bp, synthetic construct
  source 1..20: mol_type = other DNA
ctacacatcagtgttagata

SEQ ID NO: 153136 - DNA, 20 bp, synthetic construct
  source 1..20: mol_type = other DNA
cctacacatcagtgttagat

SEQ ID NO: 153137 - DNA, 20 bp, synthetic construct
  source 1..20: mol_type = other DNA
acctacacatcagtgttaga

SEQ ID NO: 153138 - DNA, 20 bp, synthetic construct
  source 1..20: mol_type = other DNA
tacctacacatcagtgttag

SEQ ID NO: 153139 - DNA, 20 bp, synthetic construct
  source 1..20: mol_type = other DNA
gtacctacacatcagtgtta

SEQ ID NO: 153140 - DNA, 20 bp, synthetic construct
  source 1..20: mol_type = other DNA
agtacctacacatcagtgtt

SEQ ID NO: 153141 - DNA, 20 bp, synthetic construct
  source 1..20: mol_type = other DNA
gagtacctacacatcagtgt

SEQ ID NO: 153142 - DNA, 20 bp, synthetic construct
  source 1..20: mol_type = other DNA
tgagtacctacacatcagtg

SEQ ID NO: 153143 - DNA, 20 bp, synthetic construct
  source 1..20: mol_type = other DNA
gtgagtacctacacatcagt

SEQ ID NO: 153144 - DNA, 20 bp, synthetic construct
  source 1..20: mol_type = other DNA
agtgagtacctacacatcag

SEQ ID NO: 153145 - DNA, 20 bp, synthetic construct
  source 1..20: mol_type = other DNA
aagtgagtacctacacatca

SEQ ID NO: 153146 - DNA, 20 bp, synthetic construct
  source 1..20: mol_type = other DNA
aaagtgagtacctacacatc

SEQ ID NO: 153147 - DNA, 20 bp, synthetic construct
  source 1..20: mol_type = other DNA
caaagtgagtacctacacat

SEQ ID NO: 153148 - DNA, 20 bp, synthetic construct
  source 1..20: mol_type = other DNA
gcaaagtgagtacctacaca

SEQ ID NO: 153149 - DNA, 20 bp, synthetic construct
  source 1..20: mol_type = other DNA
agcaaagtgagtacctacac

SEQ ID NO: 153150 - DNA, 20 bp, synthetic construct
  source 1..20: mol_type = other DNA
aagcaaagtgagtacctaca

SEQ ID NO: 153151 - DNA, 20 bp, synthetic construct
  source 1..20: mol_type = other DNA
caagcaaagtgagtacctac

SEQ ID NO: 153152 - DNA, 20 bp, synthetic construct
  source 1..20: mol_type = other DNA
gcaagcaaagtgagtaccta

SEQ ID NO: 153153 - DNA, 20 bp, synthetic construct
  source 1..20: mol_type = other DNA
ggcaagcaaagtgagtacct

SEQ ID NO: 153154 - DNA, 20 bp, synthetic construct
  source 1..20: mol_type = other DNA
tggcaagcaaagtgagtacc

SEQ ID NO: 153155 - DNA, 20 bp, synthetic construct
  source 1..20: mol_type = other DNA
gtggcaagcaaagtgagtac

SEQ ID NO: 153156 - DNA, 20 bp, synthetic construct
  source 1..20: mol_type = other DNA
agtggcaagcaaagtgagta

SEQ ID NO: 153157 - DNA, 20 bp, synthetic construct
  source 1..20: mol_type = other DNA
gagtggcaagcaaagtgagt

SEQ ID NO: 153158 - DNA, 20 bp, synthetic construct
  source 1..20: mol_type = other DNA
agagtggcaagcaaagtgag

SEQ ID NO: 153159 - DNA, 20 bp, synthetic construct
  source 1..20: mol_type = other DNA
tagagtggcaagcaaagtga

SEQ ID NO: 153160 - DNA, 20 bp, synthetic construct
  source 1..20: mol_type = other DNA
atagagtggcaagcaaagtg

SEQ ID NO: 153161 - DNA, 20 bp, synthetic construct
  source 1..20: mol_type = other DNA
aatagagtggcaagcaaagt

SEQ ID NO: 153162 - DNA, 20 bp, synthetic construct
  source 1..20: mol_type = other DNA
taatagagtggcaagcaaag

SEQ ID NO: 153163 - DNA, 20 bp, synthetic construct
  source 1..20: mol_type = other DNA
ctaatagagtggcaagcaaa

SEQ ID NO: 153164 - DNA, 20 bp, synthetic construct
  source 1..20: mol_type = other DNA
cctaatagagtggcaagcaa

SEQ ID NO: 153165 - DNA, 20 bp, synthetic construct
  source 1..20: mol_type = other DNA
acctaatagagtggcaagca

SEQ ID NO: 153166 - DNA, 20 bp, synthetic construct
  source 1..20: mol_type = other DNA
cacctaatagagtggcaagc

SEQ ID NO: 153167 - DNA, 20 bp, synthetic construct
  source 1..20: mol_type = other DNA
gcacctaatagagtggcaag

SEQ ID NO: 153168 - DNA, 20 bp, synthetic construct
  source 1..20: mol_type = other DNA
agcacctaatagagtggcaa

SEQ ID NO: 153169 - DNA, 20 bp, synthetic construct
  source 1..20: mol_type = other DNA
aagcacctaatagagtggca

SEQ ID NO: 153170 - DNA, 20 bp, synthetic construct
  source 1..20: mol_type = other DNA
aaagcacctaatagagtggc

SEQ ID NO: 153171 - DNA, 20 bp, synthetic construct
  source 1..20: mol_type = other DNA
aaaagcacctaatagagtgg

SEQ ID NO: 153172 - DNA, 20 bp, synthetic construct
  source 1..20: mol_type = other DNA
aaaaagcacctaatagagtg

SEQ ID NO: 153173 - DNA, 20 bp, synthetic construct
  source 1..20: mol_type = other DNA
taaaaagcacctaatagagt

SEQ ID NO: 153174 - DNA, 20 bp, synthetic construct
  source 1..20: mol_type = other DNA
ataaaaagcacctaatagag

SEQ ID NO: 153175 - DNA, 20 bp, synthetic construct
  source 1..20: mol_type = other DNA
cataaaaagcacctaataga

SEQ ID NO: 153176 - DNA, 20 bp, synthetic construct
  source 1..20: mol_type = other DNA
acataaaaagcacctaatag

SEQ ID NO: 153177 - DNA, 20 bp, synthetic construct
  source 1..20: mol_type = other DNA
aacataaaaagcacctaata

SEQ ID NO: 153178 - DNA, 20 bp, synthetic construct
  source 1..20: mol_type = other DNA
taacataaaaagcacctaat

SEQ ID NO: 153179 - DNA, 20 bp, synthetic construct
  source 1..20: mol_type = other DNA
ataacataaaaagcacctaa

SEQ ID NO: 153180 - DNA, 20 bp, synthetic construct
  source 1..20: mol_type = other DNA
aataacataaaaagcaccta

SEQ ID NO: 153181 - DNA, 20 bp, synthetic construct
  source 1..20: mol_type = other DNA
aaataacataaaaagcacct

SEQ ID NO: 153182 - DNA, 20 bp, synthetic construct
  source 1..20: mol_type = other DNA
taaataacataaaaagcacc

SEQ ID NO: 153183 - DNA, 20 bp, synthetic construct
  source 1..20: mol_type = other DNA
ttaaataacataaaaagcac

SEQ ID NO: 153184 - DNA, 20 bp, synthetic construct
  source 1..20: mol_type = other DNA
attaaataacataaaaagca

SEQ ID NO: 153185 - DNA, 20 bp, synthetic construct
  source 1..20: mol_type = other DNA
gattaaataacataaaaagc

SEQ ID NO: 153186 - DNA, 20 bp, synthetic construct
  source 1..20: mol_type = other DNA
tgattaaataacataaaaag

SEQ ID NO: 153187 - DNA, 20 bp, synthetic construct
  source 1..20: mol_type = other DNA
atgattaaataacataaaaa

SEQ ID NO: 153188 - DNA, 20 bp, synthetic construct
  source 1..20: mol_type = other DNA
catgattaaataacataaaa

SEQ ID NO: 153189 - DNA, 20 bp, synthetic construct
  source 1..20: mol_type = other DNA
tcatgattaaataacataaa

SEQ ID NO: 153190 - DNA, 20 bp, synthetic construct
  source 1..20: mol_type = other DNA
ttcatgattaaataacataa

SEQ ID NO: 153191 - DNA, 20 bp, synthetic construct
  source 1..20: mol_type = other DNA
cttcatgattaaataacata

SEQ ID NO: 153192 - DNA, 20 bp, synthetic construct
  source 1..20: mol_type = other DNA
gcttcatgattaaataacat

SEQ ID NO: 153193 - DNA, 20 bp, synthetic construct
  source 1..20: mol_type = other DNA
ggcttcatgattaaataaca

SEQ ID NO: 153194 - DNA, 20 bp, synthetic construct
  source 1..20: mol_type = other DNA
aggcttcatgattaaataac

SEQ ID NO: 153195 - DNA, 20 bp, synthetic construct
  source 1..20: mol_type = other DNA
caggcttcatgattaaataa

SEQ ID NO: 153196 - DNA, 20 bp, synthetic construct
  source 1..20: mol_type = other DNA
ccaggcttcatgattaaata

SEQ ID NO: 153197 - DNA, 20 bp, synthetic construct
  source 1..20: mol_type = other DNA
gccaggcttcatgattaaat

SEQ ID NO: 153198 - DNA, 20 bp, synthetic construct
  source 1..20: mol_type = other DNA
ggccaggcttcatgattaaa

SEQ ID NO: 153199 - DNA, 20 bp, synthetic construct
  source 1..20: mol_type = other DNA
tggccaggcttcatgattaa

SEQ ID NO: 153200 - DNA, 20 bp, synthetic construct
  source 1..20: mol_type = other DNA
gtggccaggcttcatgatta

SEQ ID NO: 153201 - DNA, 20 bp, synthetic construct
  source 1..20: mol_type = other DNA
tgtggccaggcttcatgatt

SEQ ID NO: 153202 - DNA, 20 bp, synthetic construct
  source 1..20: mol_type = other DNA
ctgtggccaggcttcatgat

SEQ ID NO: 153203 - DNA, 20 bp, synthetic construct
  source 1..20: mol_type = other DNA
cctgtggccaggcttcatga

SEQ ID NO: 153204 - DNA, 20 bp, synthetic construct
  source 1..20: mol_type = other DNA
ccctgtggccaggcttcatg

SEQ ID NO: 153205 - DNA, 20 bp, synthetic construct
  source 1..20: mol_type = other DNA
accctgtggccaggcttcat

SEQ ID NO: 153206 - DNA, 20 bp, synthetic construct
  source 1..20: mol_type = other DNA
caccctgtggccaggcttca

SEQ ID NO: 153207 - DNA, 20 bp, synthetic construct
  source 1..20: mol_type = other DNA
gcaccctgtggccaggcttc

SEQ ID NO: 153208 - DNA, 20 bp, synthetic construct
  source 1..20: mol_type = other DNA
agcaccctgtggccaggctt

SEQ ID NO: 153209 - DNA, 20 bp, synthetic construct
  source 1..20: mol_type = other DNA
aagcaccctgtggccaggct

SEQ ID NO: 153210 - DNA, 20 bp, synthetic construct
  source 1..20: mol_type = other DNA
caagcaccctgtggccaggc

SEQ ID NO: 153211 - DNA, 20 bp, synthetic construct
  source 1..20: mol_type = other DNA
acaagcaccctgtggccagg

SEQ ID NO: 153212 - DNA, 20 bp, synthetic construct
  source 1..20: mol_type = other DNA
cacaagcaccctgtggccag

SEQ ID NO: 153213 - DNA, 20 bp, synthetic construct
  source 1..20: mol_type = other DNA
gcacaagcaccctgtggcca

SEQ ID NO: 153214 - DNA, 20 bp, synthetic construct
  source 1..20: mol_type = other DNA
tgcacaagcaccctgtggcc

SEQ ID NO: 153215 - DNA, 20 bp, synthetic construct
  source 1..20: mol_type = other DNA
atgcacaagcaccctgtggc

SEQ ID NO: 153216 - DNA, 20 bp, synthetic construct
  source 1..20: mol_type = other DNA
aatgcacaagcaccctgtgg

SEQ ID NO: 153217 - DNA, 20 bp, synthetic construct
  source 1..20: mol_type = other DNA
caatgcacaagcaccctgtg

SEQ ID NO: 153218 - DNA, 20 bp, synthetic construct
  source 1..20: mol_type = other DNA
tcaatgcacaagcaccctgt

SEQ ID NO: 153219 - DNA, 20 bp, synthetic construct
  source 1..20: mol_type = other DNA
ctcaatgcacaagcaccctg

SEQ ID NO: 153220 - DNA, 20 bp, synthetic construct
  source 1..20: mol_type = other DNA
actcaatgcacaagcaccct

SEQ ID NO: 153221 - DNA, 20 bp, synthetic construct
  source 1..20: mol_type = other DNA
cactcaatgcacaagcaccc

SEQ ID NO: 153222 - DNA, 20 bp, synthetic construct
  source 1..20: mol_type = other DNA
acactcaatgcacaagcacc

SEQ ID NO: 153223 - DNA, 20 bp, synthetic construct
  source 1..20: mol_type = other DNA
cacactcaatgcacaagcac

SEQ ID NO: 153224 - DNA, 20 bp, synthetic construct
  source 1..20: mol_type = other DNA
ccacactcaatgcacaagca

SEQ ID NO: 153225 - DNA, 20 bp, synthetic construct
  source 1..20: mol_type = other DNA
cccacactcaatgcacaagc

SEQ ID NO: 153226 - DNA, 20 bp, synthetic construct
  source 1..20: mol_type = other DNA
tcccacactcaatgcacaag

SEQ ID NO: 153227 - DNA, 20 bp, synthetic construct
  source 1..20: mol_type = other DNA
ttcccacactcaatgcacaa

SEQ ID NO: 153228 - DNA, 20 bp, synthetic construct
  source 1..20: mol_type = other DNA
gttcccacactcaatgcaca

SEQ ID NO: 153229 - DNA, 20 bp, synthetic construct
  source 1..20: mol_type = other DNA
tgttcccacactcaatgcac

SEQ ID NO: 153230 - DNA, 20 bp, synthetic construct
  source 1..20: mol_type = other DNA
ttgttcccacactcaatgca

SEQ ID NO: 153231 - DNA, 20 bp, synthetic construct
  source 1..20: mol_type = other DNA
cttgttcccacactcaatgc

SEQ ID NO: 153232 - DNA, 20 bp, synthetic construct
  source 1..20: mol_type = other DNA
tcttgttcccacactcaatg

SEQ ID NO: 153233 - DNA, 20 bp, synthetic construct
  source 1..20: mol_type = other DNA
atcttgttcccacactcaat

SEQ ID NO: 153234 - DNA, 20 bp, synthetic construct
  source 1..20: mol_type = other DNA
aatcttgttcccacactcaa

SEQ ID NO: 153235 - DNA, 20 bp, synthetic construct
  source 1..20: mol_type = other DNA
taatcttgttcccacactca

SEQ ID NO: 153236 - DNA, 20 bp, synthetic construct
  source 1..20: mol_type = other DNA
gtaatcttgttcccacactc

SEQ ID NO: 153237 - DNA, 20 bp, synthetic construct
  source 1..20: mol_type = other DNA
ggtaatcttgttcccacact

SEQ ID NO: 153238 - DNA, 20 bp, synthetic construct
  source 1..20: mol_type = other DNA
tggtaatcttgttcccacac

SEQ ID NO: 153239 - DNA, 20 bp, synthetic construct
  source 1..20: mol_type = other DNA
atggtaatcttgttcccaca

SEQ ID NO: 153240 - DNA, 20 bp, synthetic construct
  source 1..20: mol_type = other DNA
gatggtaatcttgttcccac

SEQ ID NO: 153241 - DNA, 20 bp, synthetic construct
  source 1..20: mol_type = other DNA
agatggtaatcttgttccca

SEQ ID NO: 153242 - DNA, 20 bp, synthetic construct
  source 1..20: mol_type = other DNA
gagatggtaatcttgttccc

SEQ ID NO: 153243 - DNA, 20 bp, synthetic construct
  source 1..20: mol_type = other DNA
ggagatggtaatcttgttcc

SEQ ID NO: 153244 - DNA, 20 bp, synthetic construct
  source 1..20: mol_type = other DNA
gggagatggtaatcttgttc

SEQ ID NO: 153245 - DNA, 20 bp, synthetic construct
  source 1..20: mol_type = other DNA
agggagatggtaatcttgtt

SEQ ID NO: 153246 - DNA, 20 bp, synthetic construct
  source 1..20: mol_type = other DNA
aagggagatggtaatcttgt

SEQ ID NO: 153247 - DNA, 20 bp, synthetic construct
  source 1..20: mol_type = other DNA
aaagggagatggtaatcttg

SEQ ID NO: 153248 - DNA, 20 bp, synthetic construct
  source 1..20: mol_type = other DNA
aaaagggagatggtaatctt

SEQ ID NO: 153249 - DNA, 20 bp, synthetic construct
  source 1..20: mol_type = other DNA
caaaagggagatggtaatct

SEQ ID NO: 153250 - DNA, 20 bp, synthetic construct
  source 1..20: mol_type = other DNA
tcaaaagggagatggtaatc

SEQ ID NO: 153251 - DNA, 20 bp, synthetic construct
  source 1..20: mol_type = other DNA
ctcaaaagggagatggtaat

SEQ ID NO: 153252 - DNA, 20 bp, synthetic construct
  source 1..20: mol_type = other DNA
cctcaaaagggagatggtaa

SEQ ID NO: 153253 - DNA, 20 bp, synthetic construct
  source 1..20: mol_type = other DNA
tcctcaaaagggagatggta

SEQ ID NO: 153254 - DNA, 20 bp, synthetic construct
  source 1..20: mol_type = other DNA
gtcctcaaaagggagatggt

SEQ ID NO: 153255 - DNA, 20 bp, synthetic construct
  source 1..20: mol_type = other DNA
tgtcctcaaaagggagatgg

SEQ ID NO: 153256 - DNA, 20 bp, synthetic construct
  source 1..20: mol_type = other DNA
gtgtcctcaaaagggagatg

SEQ ID NO: 153257 - DNA, 20 bp, synthetic construct
  source 1..20: mol_type = other DNA
tgtgtcctcaaaagggagat

SEQ ID NO: 153258 - DNA, 20 bp, synthetic construct
  source 1..20: mol_type = other DNA
ctgtgtcctcaaaagggaga

SEQ ID NO: 153259 - DNA, 20 bp, synthetic construct
  source 1..20: mol_type = other DNA
cctgtgtcctcaaaagggag

SEQ ID NO: 153260 - DNA, 20 bp, synthetic construct
  source 1..20: mol_type = other DNA
gcctgtgtcctcaaaaggga

SEQ ID NO: 153261 - DNA, 20 bp, synthetic construct
  source 1..20: mol_type = other DNA
ggcctgtgtcctcaaaaggg

SEQ ID NO: 153262 - DNA, 20 bp, synthetic construct
  source 1..20: mol_type = other DNA
aggcctgtgtcctcaaaagg

SEQ ID NO: 153263 - DNA, 20 bp, synthetic construct
  source 1..20: mol_type = other DNA
taggcctgtgtcctcaaaag

SEQ ID NO: 153264 - DNA, 20 bp, synthetic construct
  source 1..20: mol_type = other DNA
ctaggcctgtgtcctcaaaa

SEQ ID NO: 153265 - DNA, 20 bp, synthetic construct
  source 1..20: mol_type = other DNA
tctaggcctgtgtcctcaaa

SEQ ID NO: 153266 - DNA, 20 bp, synthetic construct
  source 1..20: mol_type = other DNA
ctctaggcctgtgtcctcaa

SEQ ID NO: 153267 - DNA, 20 bp, synthetic construct
  source 1..20: mol_type = other DNA
gctctaggcctgtgtcctca

SEQ ID NO: 153268 - DNA, 20 bp, synthetic construct
  source 1..20: mol_type = other DNA
tgctctaggcctgtgtcctc

SEQ ID NO: 153269 - DNA, 20 bp, synthetic construct
  source 1..20: mol_type = other DNA
ctgctctaggcctgtgtcct

SEQ ID NO: 153270 - DNA, 20 bp, synthetic construct
  source 1..20: mol_type = other DNA
actgctctaggcctgtgtcc

SEQ ID NO: 153271 - DNA, 20 bp, synthetic construct
  source 1..20: mol_type = other DNA
aactgctctaggcctgtgtc

SEQ ID NO: 153272 - DNA, 20 bp, synthetic construct
  source 1..20: mol_type = other DNA
taactgctctaggcctgtgt

SEQ ID NO: 153273 - DNA, 20 bp, synthetic construct
  source 1..20: mol_type = other DNA
ttaactgctctaggcctgtg

SEQ ID NO: 153274 - DNA, 20 bp, synthetic construct
  source 1..20: mol_type = other DNA
cttaactgctctaggcctgt

SEQ ID NO: 153275 - DNA, 20 bp, synthetic construct
  source 1..20: mol_type = other DNA
gcttaactgctctaggcctg

SEQ ID NO: 153276 - DNA, 20 bp, synthetic construct
  source 1..20: mol_type = other DNA
tgcttaactgctctaggcct

SEQ ID NO: 153277 - DNA, 20 bp, synthetic construct
  source 1..20: mol_type = other DNA
ctgcttaactgctctaggcc

SEQ ID NO: 153278 - DNA, 20 bp, synthetic construct
  source 1..20: mol_type = other DNA
gctgcttaactgctctaggc

SEQ ID NO: 153279 - DNA, 20 bp, synthetic construct
  source 1..20: mol_type = other DNA
agctgcttaactgctctagg

SEQ ID NO: 153280 - DNA, 20 bp, synthetic construct
  source 1..20: mol_type = other DNA
aagctgcttaactgctctag

SEQ ID NO: 153281 - DNA, 20 bp, synthetic construct
  source 1..20: mol_type = other DNA
caagctgcttaactgctcta

SEQ ID NO: 153282 - DNA, 20 bp, synthetic construct
  source 1..20: mol_type = other DNA
gcaagctgcttaactgctct

SEQ ID NO: 153283 - DNA, 20 bp, synthetic construct
  source 1..20: mol_type = other DNA
agcaagctgcttaactgctc

SEQ ID NO: 153284 - DNA, 20 bp, synthetic construct
  source 1..20: mol_type = other DNA
cagcaagctgcttaactgct

SEQ ID NO: 153285 - DNA, 20 bp, synthetic construct
  source 1..20: mol_type = other DNA
ccagcaagctgcttaactgc

SEQ ID NO: 153286 - DNA, 20 bp, synthetic construct
  source 1..20: mol_type = other DNA
tccagcaagctgcttaactg

SEQ ID NO: 153287 - DNA, 20 bp, synthetic construct
  source 1..20: mol_type = other DNA
ctccagcaagctgcttaact

SEQ ID NO: 153288 - DNA, 20 bp, synthetic construct
  source 1..20: mol_type = other DNA
cctccagcaagctgcttaac

SEQ ID NO: 153289 - DNA, 20 bp, synthetic construct
  source 1..20: mol_type = other DNA
acctccagcaagctgcttaa

SEQ ID NO: 153290 - DNA, 20 bp, synthetic construct
  source 1..20: mol_type = other DNA
aacctccagcaagctgctta

SEQ ID NO: 153291 - DNA, 20 bp, synthetic construct
  source 1..20: mol_type = other DNA
gaacctccagcaagctgctt

SEQ ID NO: 153292 - DNA, 20 bp, synthetic construct
  source 1..20: mol_type = other DNA
tgaacctccagcaagctgct

SEQ ID NO: 153293 - DNA, 20 bp, synthetic construct
  source 1..20: mol_type = other DNA
gtgaacctccagcaagctgc

SEQ ID NO: 153294 - DNA, 20 bp, synthetic construct
  source 1..20: mol_type = other DNA
agtgaacctccagcaagctg

SEQ ID NO: 153295 - DNA, 20 bp, synthetic construct
  source 1..20: mol_type = other DNA
cagtgaacctccagcaagct

SEQ ID NO: 153296 - DNA, 20 bp, synthetic construct
  source 1..20: mol_type = other DNA
ccagtgaacctccagcaagc

SEQ ID NO: 153297 - DNA, 20 bp, synthetic construct
  source 1..20: mol_type = other DNA
gccagtgaacctccagcaag

SEQ ID NO: 153298 - DNA, 20 bp, synthetic construct
  source 1..20: mol_type = other DNA
agccagtgaacctccagcaa

SEQ ID NO: 153299 - DNA, 20 bp, synthetic construct
  source 1..20: mol_type = other DNA
tagccagtgaacctccagca

SEQ ID NO: 153300 - DNA, 20 bp, synthetic construct
  source 1..20: mol_type = other DNA
ctagccagtgaacctccagc

SEQ ID NO: 153301 - DNA, 20 bp, synthetic construct
  source 1..20: mol_type = other DNA
tctagccagtgaacctccag

SEQ ID NO: 153302 - DNA, 20 bp, synthetic construct
  source 1..20: mol_type = other DNA
ttctagccagtgaacctcca

SEQ ID NO: 153303 - DNA, 20 bp, synthetic construct
  source 1..20: mol_type = other DNA
tttctagccagtgaacctcc

SEQ ID NO: 153304 - DNA, 20 bp, synthetic construct
  source 1..20: mol_type = other DNA
ctttctagccagtgaacctc

SEQ ID NO: 153305 - DNA, 20 bp, synthetic construct
  source 1..20: mol_type = other DNA
actttctagccagtgaacct

SEQ ID NO: 153306 - DNA, 20 bp, synthetic construct
  source 1..20: mol_type = other DNA
cactttctagccagtgaacc

SEQ ID NO: 153307 - DNA, 20 bp, synthetic construct
  source 1..20: mol_type = other DNA
ccactttctagccagtgaac

SEQ ID NO: 153308 - DNA, 20 bp, synthetic construct
  source 1..20: mol_type = other DNA
accactttctagccagtgaa

SEQ ID NO: 153309 - DNA, 20 bp, synthetic construct
  source 1..20: mol_type = other DNA
gaccactttctagccagtga

SEQ ID NO: 153310 - DNA, 20 bp, synthetic construct
  source 1..20: mol_type = other DNA
tgaccactttctagccagtg

SEQ ID NO: 153311 - DNA, 20 bp, synthetic construct
  source 1..20: mol_type = other DNA
ctgaccactttctagccagt

SEQ ID NO: 153312 - DNA, 20 bp, synthetic construct
  source 1..20: mol_type = other DNA
gctgaccactttctagccag

SEQ ID NO: 153313 - DNA, 20 bp, synthetic construct
  source 1..20: mol_type = other DNA
ggctgaccactttctagcca

SEQ ID NO: 153314 - DNA, 20 bp, synthetic construct
  source 1..20: mol_type = other DNA
aggctgaccactttctagcc

SEQ ID NO: 153315 - DNA, 20 bp, synthetic construct
  source 1..20: mol_type = other DNA
caggctgaccactttctagc

SEQ ID NO: 153316 - DNA, 20 bp, synthetic construct
  source 1..20: mol_type = other DNA
ccaggctgaccactttctag

SEQ ID NO: 153317 - DNA, 20 bp, synthetic construct
  source 1..20: mol_type = other DNA
cccaggctgaccactttcta

SEQ ID NO: 153318 - DNA, 20 bp, synthetic construct
  source 1..20: mol_type = other DNA
tcccaggctgaccactttct

SEQ ID NO: 153319 - DNA, 20 bp, synthetic construct
  source 1..20: mol_type = other DNA
atcccaggctgaccactttc

SEQ ID NO: 153320 - DNA, 20 bp, synthetic construct
  source 1..20: mol_type = other DNA
aatcccaggctgaccacttt

SEQ ID NO: 153321 - DNA, 20 bp, synthetic construct
  source 1..20: mol_type = other DNA
aaatcccaggctgaccactt

SEQ ID NO: 153322 - DNA, 20 bp, synthetic construct
  source 1..20: mol_type = other DNA
caaatcccaggctgaccact

SEQ ID NO: 153323 - DNA, 20 bp, synthetic construct
  source 1..20: mol_type = other DNA
ccaaatcccaggctgaccac

SEQ ID NO: 153324 - DNA, 20 bp, synthetic construct
  source 1..20: mol_type = other DNA
tccaaatcccaggctgacca

SEQ ID NO: 153325 - DNA, 20 bp, synthetic construct
  source 1..20: mol_type = other DNA
gtccaaatcccaggctgacc

SEQ ID NO: 153326 - DNA, 20 bp, synthetic construct
  source 1..20: mol_type = other DNA
tgtccaaatcccaggctgac

SEQ ID NO: 153327 - DNA, 20 bp, synthetic construct
  source 1..20: mol_type = other DNA
gtgtccaaatcccaggctga

SEQ ID NO: 153328 - DNA, 20 bp, synthetic construct
  source 1..20: mol_type = other DNA
tgtgtccaaatcccaggctg

SEQ ID NO: 153329 - DNA, 20 bp, synthetic construct
  source 1..20: mol_type = other DNA
ctgtgtccaaatcccaggct

SEQ ID NO: 153330 - DNA, 20 bp, synthetic construct
  source 1..20: mol_type = other DNA
tctgtgtccaaatcccaggc

SEQ ID NO: 153331 - DNA, 20 bp, synthetic construct
  source 1..20: mol_type = other DNA
atctgtgtccaaatcccagg

SEQ ID NO: 153332 - DNA, 20 bp, synthetic construct
  source 1..20: mol_type = other DNA
aatctgtgtccaaatcccag

SEQ ID NO: 153333 - DNA, 20 bp, synthetic construct
  source 1..20: mol_type = other DNA
aaatctgtgtccaaatccca

SEQ ID NO: 153334 - DNA, 20 bp, synthetic construct
  source 1..20: mol_type = other DNA
aaaatctgtgtccaaatccc

SEQ ID NO: 153335 - DNA, 20 bp, synthetic construct
  source 1..20: mol_type = other DNA
aaaaatctgtgtccaaatcc

SEQ ID NO: 153336 - DNA, 20 bp, synthetic construct
  source 1..20: mol_type = other DNA
gaaaaatctgtgtccaaatc

SEQ ID NO: 153337 - DNA, 20 bp, synthetic construct
  source 1..20: mol_type = other DNA
ggaaaaatctgtgtccaaat

SEQ ID NO: 153338 - DNA, 20 bp, synthetic construct
  source 1..20: mol_type = other DNA
tggaaaaatctgtgtccaaa

SEQ ID NO: 153339 - DNA, 20 bp, synthetic construct
  source 1..20: mol_type = other DNA
gtggaaaaatctgtgtccaa

SEQ ID NO: 153340 - DNA, 20 bp, synthetic construct
  source 1..20: mol_type = other DNA
agtggaaaaatctgtgtcca

SEQ ID NO: 153341 - DNA, 20 bp, synthetic construct
  source 1..20: mol_type = other DNA
gagtggaaaaatctgtgtcc

SEQ ID NO: 153342 - DNA, 20 bp, synthetic construct
  source 1..20: mol_type = other DNA
ggagtggaaaaatctgtgtc

SEQ ID NO: 153343 - DNA, 20 bp, synthetic construct
  source 1..20: mol_type = other DNA
gggagtggaaaaatctgtgt

SEQ ID NO: 153344 - DNA, 20 bp, synthetic construct
  source 1..20: mol_type = other DNA
tgggagtggaaaaatctgtg

SEQ ID NO: 153345 - DNA, 20 bp, synthetic construct
  source 1..20: mol_type = other DNA
ttgggagtggaaaaatctgt

SEQ ID NO: 153346 - DNA, 20 bp, synthetic construct
  source 1..20: mol_type = other DNA
cttgggagtggaaaaatctg

SEQ ID NO: 153347 - DNA, 20 bp, synthetic construct
  source 1..20: mol_type = other DNA
acttgggagtggaaaaatct

SEQ ID NO: 153348 - DNA, 20 bp, synthetic construct
  source 1..20: mol_type = other DNA
gacttgggagtggaaaaatc

SEQ ID NO: 153349 - DNA, 20 bp, synthetic construct
  source 1..20: mol_type = other DNA
agacttgggagtggaaaaat

SEQ ID NO: 153350 - DNA, 20 bp, synthetic construct
  source 1..20: mol_type = other DNA
cagacttgggagtggaaaaa

SEQ ID NO: 153351 - DNA, 20 bp, synthetic construct
  source 1..20: mol_type = other DNA
ccagacttgggagtggaaaa

SEQ ID NO: 153352 - DNA, 20 bp, synthetic construct
  source 1..20: mol_type = other DNA
gccagacttgggagtggaaa

SEQ ID NO: 153353 - DNA, 20 bp, synthetic construct
  source 1..20: mol_type = other DNA
agccagacttgggagtggaa

SEQ ID NO: 153354 - DNA, 20 bp, synthetic construct
  source 1..20: mol_type = other DNA
cagccagacttgggagtgga

SEQ ID NO: 153355 - DNA, 20 bp, synthetic construct
  source 1..20: mol_type = other DNA
gcagccagacttgggagtgg

SEQ ID NO: 153356 - DNA, 20 bp, synthetic construct
  source 1..20: mol_type = other DNA
agcagccagacttgggagtg

SEQ ID NO: 153357 - DNA, 20 bp, synthetic construct
  source 1..20: mol_type = other DNA
aagcagccagacttgggagt

SEQ ID NO: 153358 - DNA, 20 bp, synthetic construct
  source 1..20: mol_type = other DNA
aaagcagccagacttgggag

SEQ ID NO: 153359 - DNA, 20 bp, synthetic construct
  source 1..20: mol_type = other DNA
aaaagcagccagacttggga

SEQ ID NO: 153360 - DNA, 20 bp, synthetic construct
  source 1..20: mol_type = other DNA
aaaaagcagccagacttggg

SEQ ID NO: 153361 - DNA, 20 bp, synthetic construct
  source 1..20: mol_type = other DNA
taaaaagcagccagacttgg

SEQ ID NO: 153362 - DNA, 20 bp, synthetic construct
  source 1..20: mol_type = other DNA
gtaaaaagcagccagacttg

SEQ ID NO: 153363 - DNA, 20 bp, synthetic construct
  source 1..20: mol_type = other DNA
agtaaaaagcagccagactt

SEQ ID NO: 153364 - DNA, 20 bp, synthetic construct
  source 1..20: mol_type = other DNA
aagtaaaaagcagccagact

SEQ ID NO: 153365 - DNA, 20 bp, synthetic construct
  source 1..20: mol_type = other DNA
gaagtaaaaagcagccagac

SEQ ID NO: 153366 - DNA, 20 bp, synthetic construct
  source 1..20: mol_type = other DNA
tgaagtaaaaagcagccaga

SEQ ID NO: 153367 - DNA, 20 bp, synthetic construct
  source 1..20: mol_type = other DNA
gtgaagtaaaaagcagccag

SEQ ID NO: 153368 - DNA, 20 bp, synthetic construct
  source 1..20: mol_type = other DNA
agtgaagtaaaaagcagcca

SEQ ID NO: 153369 - DNA, 20 bp, synthetic construct
  source 1..20: mol_type = other DNA
cagtgaagtaaaaagcagcc

SEQ ID NO: 153370 - DNA, 20 bp, synthetic construct
  source 1..20: mol_type = other DNA
acagtgaagtaaaaagcagc

SEQ ID NO: 153371 - DNA, 20 bp, synthetic construct
  source 1..20: mol_type = other DNA
cacagtgaagtaaaaagcag

SEQ ID NO: 153372 - DNA, 20 bp, synthetic construct
  source 1..20: mol_type = other DNA
tcacagtgaagtaaaaagca

SEQ ID NO: 153373 - DNA, 20 bp, synthetic construct
  source 1..20: mol_type = other DNA
ctcacagtgaagtaaaaagc

SEQ ID NO: 153374 - DNA, 20 bp, synthetic construct
  source 1..20: mol_type = other DNA
cctcacagtgaagtaaaaag

SEQ ID NO: 153375 - DNA, 20 bp, synthetic construct
  source 1..20: mol_type = other DNA
ccctcacagtgaagtaaaaa

SEQ ID NO: 153376 - DNA, 20 bp, synthetic construct
  source 1..20: mol_type = other DNA
cccctcacagtgaagtaaaa

SEQ ID NO: 153377 - DNA, 20 bp, synthetic construct
  source 1..20: mol_type = other DNA
acccctcacagtgaagtaaa

SEQ ID NO: 153378 - DNA, 20 bp, synthetic construct
  source 1..20: mol_type = other DNA
tacccctcacagtgaagtaa

SEQ ID NO: 153379 - DNA, 20 bp, synthetic construct
  source 1..20: mol_type = other DNA
ttacccctcacagtgaagta

SEQ ID NO: 153380 - DNA, 20 bp, synthetic construct
  source 1..20: mol_type = other DNA
tttacccctcacagtgaagt

SEQ ID NO: 153381 - DNA, 20 bp, synthetic construct
  source 1..20: mol_type = other DNA
ctttacccctcacagtgaag

SEQ ID NO: 153382 - DNA, 20 bp, synthetic construct
  source 1..20: mol_type = other DNA
cctttacccctcacagtgaa

SEQ ID NO: 153383 - DNA, 20 bp, synthetic construct
  source 1..20: mol_type = other DNA
acctttacccctcacagtga

SEQ ID NO: 153384 - DNA, 20 bp, synthetic construct
  source 1..20: mol_type = other DNA
tacctttacccctcacagtg

SEQ ID NO: 153385 - DNA, 20 bp, synthetic construct
  source 1..20: mol_type = other DNA
ttacctttacccctcacagt

SEQ ID NO: 153386 - DNA, 20 bp, synthetic construct
  source 1..20: mol_type = other DNA
tttacctttacccctcacag

SEQ ID NO: 153387 - DNA, 20 bp, synthetic construct
  source 1..20: mol_type = other DNA
atttacctttacccctcaca

SEQ ID NO: 153388 - DNA, 20 bp, synthetic construct
  source 1..20: mol_type = other DNA
gatttacctttacccctcac

SEQ ID NO: 153389 - DNA, 20 bp, synthetic construct
  source 1..20: mol_type = other DNA
tgatttacctttacccctca

SEQ ID NO: 153390 - DNA, 20 bp, synthetic construct
  source 1..20: mol_type = other DNA
ctgatttacctttacccctc

SEQ ID NO: 153391 - DNA, 20 bp, synthetic construct
  source 1..20: mol_type = other DNA
gctgatttacctttacccct

SEQ ID NO: 153392 - DNA, 20 bp, synthetic construct
  source 1..20: mol_type = other DNA
agctgatttacctttacccc

SEQ ID NO: 153393 - DNA, 20 bp, synthetic construct
  source 1..20: mol_type = other DNA
cagctgatttacctttaccc

SEQ ID NO: 153394 - DNA, 20 bp, synthetic construct
  source 1..20: mol_type = other DNA
acagctgatttacctttacc

SEQ ID NO: 153395 - DNA, 20 bp, synthetic construct
  source 1..20: mol_type = other DNA
aacagctgatttacctttac

SEQ ID NO: 153396 - DNA, 20 bp, synthetic construct
  source 1..20: mol_type = other DNA
aaacagctgatttaccttta

SEQ ID NO: 153397 - DNA, 20 bp, synthetic construct
  source 1..20: mol_type = other DNA
aaaacagctgatttaccttt

SEQ ID NO: 153398 - DNA, 20 bp, synthetic construct
  source 1..20: mol_type = other DNA
gaaaacagctgatttacctt

SEQ ID NO: 153399 - DNA, 20 bp, synthetic construct
  source 1..20: mol_type = other DNA
agaaaacagctgatttacct

SEQ ID NO: 153400 - DNA, 20 bp, synthetic construct
  source 1..20: mol_type = other DNA
aagaaaacagctgatttacc

SEQ ID NO: 153401 - DNA, 20 bp, synthetic construct
  source 1..20: mol_type = other DNA
aaagaaaacagctgatttac

SEQ ID NO: 153402 - DNA, 20 bp, synthetic construct
  source 1..20: mol_type = other DNA
caaagaaaacagctgattta

SEQ ID NO: 153403 - DNA, 20 bp, synthetic construct
  source 1..20: mol_type = other DNA
acaaagaaaacagctgattt

SEQ ID NO: 153404 - DNA, 20 bp, synthetic construct
  source 1..20: mol_type = other DNA
aacaaagaaaacagctgatt

SEQ ID NO: 153405 - DNA, 20 bp, synthetic construct
  source 1..20: mol_type = other DNA
gaacaaagaaaacagctgat

SEQ ID NO: 153406 - DNA, 20 bp, synthetic construct
  source 1..20: mol_type = other DNA
tgaacaaagaaaacagctga

SEQ ID NO: 153407 - DNA, 20 bp, synthetic construct
  source 1..20: mol_type = other DNA
ctgaacaaagaaaacagctg

SEQ ID NO: 153408 - DNA, 20 bp, synthetic construct
  source 1..20: mol_type = other DNA
tctgaacaaagaaaacagct

SEQ ID NO: 153409 - DNA, 20 bp, synthetic construct
  source 1..20: mol_type = other DNA
ttctgaacaaagaaaacagc

SEQ ID NO: 153410 - DNA, 20 bp, synthetic construct
  source 1..20: mol_type = other DNA
tttctgaacaaagaaaacag

SEQ ID NO: 153411 - DNA, 20 bp, synthetic construct
  source 1..20: mol_type = other DNA
gtttctgaacaaagaaaaca

SEQ ID NO: 153412 - DNA, 20 bp, synthetic construct
  source 1..20: mol_type = other DNA
agtttctgaacaaagaaaac

SEQ ID NO: 153413 - DNA, 20 bp, synthetic construct
  source 1..20: mol_type = other DNA
gagtttctgaacaaagaaaa

SEQ ID NO: 153414 - DNA, 20 bp, synthetic construct
  source 1..20: mol_type = other DNA
agagtttctgaacaaagaaa

SEQ ID NO: 153415 - DNA, 20 bp, synthetic construct
  source 1..20: mol_type = other DNA
gagagtttctgaacaaagaa

SEQ ID NO: 153416 - DNA, 20 bp, synthetic construct
  source 1..20: mol_type = other DNA
agagagtttctgaacaaaga

SEQ ID NO: 153417 - DNA, 20 bp, synthetic construct
  source 1..20: mol_type = other DNA
gagagagtttctgaacaaag

SEQ ID NO: 153418 - DNA, 20 bp, synthetic construct
  source 1..20: mol_type = other DNA
ggagagagtttctgaacaaa

SEQ ID NO: 153419 - DNA, 20 bp, synthetic construct
  source 1..20: mol_type = other DNA
tggagagagtttctgaacaa

SEQ ID NO: 153420 - DNA, 20 bp, synthetic construct
  source 1..20: mol_type = other DNA
ttggagagagtttctgaaca

SEQ ID NO: 153421 - DNA, 20 bp, synthetic construct
  source 1..20: mol_type = other DNA
gttggagagagtttctgaac

SEQ ID NO: 153422 - DNA, 20 bp, synthetic construct
  source 1..20: mol_type = other DNA
agttggagagagtttctgaa

SEQ ID NO: 153423 - DNA, 20 bp, synthetic construct
  source 1..20: mol_type = other DNA
aagttggagagagtttctga

SEQ ID NO: 153424 - DNA, 20 bp, synthetic construct
  source 1..20: mol_type = other DNA
aaagttggagagagtttctg

SEQ ID NO: 153425 - DNA, 20 bp, synthetic construct
  source 1..20: mol_type = other DNA
caaagttggagagagtttct

SEQ ID NO: 153426 - DNA, 20 bp, synthetic construct
  source 1..20: mol_type = other DNA
gcaaagttggagagagtttc

SEQ ID NO: 153427 - DNA, 20 bp, synthetic construct
  source 1..20: mol_type = other DNA
tgcaaagttggagagagttt

SEQ ID NO: 153428 - DNA, 20 bp, synthetic construct
  source 1..20: mol_type = other DNA
gtgcaaagttggagagagtt

SEQ ID NO: 153429 - DNA, 20 bp, synthetic construct
  source 1..20: mol_type = other DNA
agtgcaaagttggagagagt

SEQ ID NO: 153430 - DNA, 20 bp, synthetic construct
  source 1..20: mol_type = other DNA
aagtgcaaagttggagagag

SEQ ID NO: 153431 - DNA, 20 bp, synthetic construct
  source 1..20: mol_type = other DNA
aaagtgcaaagttggagaga

SEQ ID NO: 153432 - DNA, 20 bp, synthetic construct
  source 1..20: mol_type = other DNA
aaaagtgcaaagttggagag

SEQ ID NO: 153433 - DNA, 20 bp, synthetic construct
  source 1..20: mol_type = other DNA
gaaaagtgcaaagttggaga

SEQ ID NO: 153434 - DNA, 20 bp, synthetic construct
  source 1..20: mol_type = other DNA
agaaaagtgcaaagttggag

SEQ ID NO: 153435 - DNA, 20 bp, synthetic construct
  source 1..20: mol_type = other DNA
aagaaaagtgcaaagttgga

SEQ ID NO: 153436 - DNA, 20 bp, synthetic construct
  source 1..20: mol_type = other DNA
taagaaaagtgcaaagttgg

SEQ ID NO: 153437 - DNA, 20 bp, synthetic construct
  source 1..20: mol_type = other DNA
ttaagaaaagtgcaaagttg

SEQ ID NO: 153438 - DNA, 20 bp, synthetic construct
  source 1..20: mol_type = other DNA
tttaagaaaagtgcaaagtt

SEQ ID NO: 153439 - DNA, 20 bp, synthetic construct
  source 1..20: mol_type = other DNA
ctttaagaaaagtgcaaagt

SEQ ID NO: 153440 - DNA, 20 bp, synthetic construct
  source 1..20: mol_type = other DNA
cctttaagaaaagtgcaaag

SEQ ID NO: 153441 - DNA, 20 bp, synthetic construct
  source 1..20: mol_type = other DNA
tcctttaagaaaagtgcaaa

SEQ ID NO: 153442 - DNA, 20 bp, synthetic construct
  source 1..20: mol_type = other DNA
ttcctttaagaaaagtgcaa

SEQ ID NO: 153443 - DNA, 20 bp, synthetic construct
  source 1..20: mol_type = other DNA
tttcctttaagaaaagtgca

SEQ ID NO: 153444 - DNA, 20 bp, synthetic construct
  source 1..20: mol_type = other DNA
ctttcctttaagaaaagtgc

SEQ ID NO: 153445 - DNA, 20 bp, synthetic construct
  source 1..20: mol_type = other DNA
actttcctttaagaaaagtg

SEQ ID NO: 153446 - DNA, 20 bp, synthetic construct
  source 1..20: mol_type = other DNA
tactttcctttaagaaaagt

SEQ ID NO: 153447 - DNA, 20 bp, synthetic construct
  source 1..20: mol_type = other DNA
ttactttcctttaagaaaag

SEQ ID NO: 153448 - DNA, 20 bp, synthetic construct
  source 1..20: mol_type = other DNA
attactttcctttaagaaaa

SEQ ID NO: 153449 - DNA, 20 bp, synthetic construct
  source 1..20: mol_type = other DNA
cattactttcctttaagaaa

SEQ ID NO: 153450 - DNA, 20 bp, synthetic construct
  source 1..20: mol_type = other DNA
ccattactttcctttaagaa

SEQ ID NO: 153451 - DNA, 20 bp, synthetic construct
  source 1..20: mol_type = other DNA
tccattactttcctttaaga

SEQ ID NO: 153452 - DNA, 20 bp, synthetic construct
  source 1..20: mol_type = other DNA
gtccattactttcctttaag

SEQ ID NO: 153453 - DNA, 20 bp, synthetic construct
  source 1..20: mol_type = other DNA
ggtccattactttcctttaa

SEQ ID NO: 153454 - DNA, 20 bp, synthetic construct
  source 1..20: mol_type = other DNA
tggtccattactttccttta

SEQ ID NO: 153455 - DNA, 20 bp, synthetic construct
  source 1..20: mol_type = other DNA
ctggtccattactttccttt

SEQ ID NO: 153456 - DNA, 20 bp, synthetic construct
  source 1..20: mol_type = other DNA
actggtccattactttcctt

SEQ ID NO: 153457 - DNA, 20 bp, synthetic construct
  source 1..20: mol_type = other DNA
cactggtccattactttcct

SEQ ID NO: 153458 - DNA, 20 bp, synthetic construct
  source 1..20: mol_type = other DNA
tcactggtccattactttcc

SEQ ID NO: 153459 - DNA, 20 bp, synthetic construct
  source 1..20: mol_type = other DNA
ttcactggtccattactttc

SEQ ID NO: 153460 - DNA, 20 bp, synthetic construct
  source 1..20: mol_type = other DNA
cttcactggtccattacttt

SEQ ID NO: 153461 - DNA, 20 bp, synthetic construct
  source 1..20: mol_type = other DNA
ccttcactggtccattactt

SEQ ID NO: 153462 - DNA, 20 bp, synthetic construct
  source 1..20: mol_type = other DNA
accttcactggtccattact

SEQ ID NO: 153463 - DNA, 20 bp, synthetic construct
  source 1..20: mol_type = other DNA
caccttcactggtccattac

SEQ ID NO: 153464 - DNA, 20 bp, synthetic construct
  source 1..20: mol_type = other DNA
acaccttcactggtccatta

SEQ ID NO: 153465 - DNA, 20 bp, synthetic construct
  source 1..20: mol_type = other DNA
cacaccttcactggtccatt

SEQ ID NO: 153466 - DNA, 20 bp, synthetic construct
  source 1..20: mol_type = other DNA
ccacaccttcactggtccat

SEQ ID NO: 153467 - DNA, 20 bp, synthetic construct
  source 1..20: mol_type = other DNA
cccacaccttcactggtcca

SEQ ID NO: 153468 - DNA, 20 bp, synthetic construct
  source 1..20: mol_type = other DNA
ccccacaccttcactggtcc

SEQ ID NO: 153469 - DNA, 20 bp, synthetic construct
  source 1..20: mol_type = other DNA
tccccacaccttcactggtc

SEQ ID NO: 153470 - DNA, 20 bp, synthetic construct
  source 1..20: mol_type = other DNA
ttccccacaccttcactggt

SEQ ID NO: 153471 - DNA, 20 bp, synthetic construct
  source 1..20: mol_type = other DNA
cttccccacaccttcactgg

SEQ ID NO: 153472 - DNA, 20 bp, synthetic construct
  source 1..20: mol_type = other DNA
gcttccccacaccttcactg

SEQ ID NO: 153473 - DNA, 20 bp, synthetic construct
  source 1..20: mol_type = other DNA
tgcttccccacaccttcact

SEQ ID NO: 153474 - DNA, 20 bp, synthetic construct
  source 1..20: mol_type = other DNA
atgcttccccacaccttcac

SEQ ID NO: 153475 - DNA, 20 bp, synthetic construct
  source 1..20: mol_type = other DNA
aatgcttccccacaccttca

SEQ ID NO: 153476 - DNA, 20 bp, synthetic construct
  source 1..20: mol_type = other DNA
taatgcttccccacaccttc

SEQ ID NO: 153477 - DNA, 20 bp, synthetic construct
  source 1..20: mol_type = other DNA
ttaatgcttccccacacctt

SEQ ID NO: 153478 - DNA, 20 bp, synthetic construct
  source 1..20: mol_type = other DNA
tttaatgcttccccacacct

SEQ ID NO: 153479 - DNA, 20 bp, synthetic construct
  source 1..20: mol_type = other DNA
ctttaatgcttccccacacc

SEQ ID NO: 153480 - DNA, 20 bp, synthetic construct
  source 1..20: mol_type = other DNA
cctttaatgcttccccacac

SEQ ID NO: 153481 - DNA, 20 bp, synthetic construct
  source 1..20: mol_type = other DNA
tcctttaatgcttccccaca

SEQ ID NO: 153482 - DNA, 20 bp, synthetic construct
  source 1..20: mol_type = other DNA
gtcctttaatgcttccccac

SEQ ID NO: 153483 - DNA, 20 bp, synthetic construct
  source 1..20: mol_type = other DNA
agtcctttaatgcttcccca

SEQ ID NO: 153484 - DNA, 20 bp, synthetic construct
  source 1..20: mol_type = other DNA
cagtcctttaatgcttcccc

SEQ ID NO: 153485 - DNA, 20 bp, synthetic construct
  source 1..20: mol_type = other DNA
tcagtcctttaatgcttccc

SEQ ID NO: 153486 - DNA, 20 bp, synthetic construct
  source 1..20: mol_type = other DNA
gtcagtcctttaatgcttcc

SEQ ID NO: 153487 - DNA, 20 bp, synthetic construct
  source 1..20: mol_type = other DNA
agtcagtcctttaatgcttc

SEQ ID NO: 153488 - DNA, 20 bp, synthetic construct
  source 1..20: mol_type = other DNA
cagtcagtcctttaatgctt

SEQ ID NO: 153489 - DNA, 20 bp, synthetic construct
  source 1..20: mol_type = other DNA
tcagtcagtcctttaatgct

SEQ ID NO: 153490 - DNA, 20 bp, synthetic construct
  source 1..20: mol_type = other DNA
ttcagtcagtcctttaatgc

SEQ ID NO: 153491 - DNA, 20 bp, synthetic construct
  source 1..20: mol_type = other DNA
cttcagtcagtcctttaatg

SEQ ID NO: 153492 - DNA, 20 bp, synthetic construct
  source 1..20: mol_type = other DNA
ccttcagtcagtcctttaat

SEQ ID NO: 153493 - DNA, 20 bp, synthetic construct
  source 1..20: mol_type = other DNA
gccttcagtcagtcctttaa

SEQ ID NO: 153494 - DNA, 20 bp, synthetic construct
  source 1..20: mol_type = other DNA
ggccttcagtcagtccttta

SEQ ID NO: 153495 - DNA, 20 bp, synthetic construct
  source 1..20: mol_type = other DNA
aggccttcagtcagtccttt

SEQ ID NO: 153496 - DNA, 20 bp, synthetic construct
  source 1..20: mol_type = other DNA
caggccttcagtcagtcctt

SEQ ID NO: 153497 - DNA, 20 bp, synthetic construct
  source 1..20: mol_type = other DNA
gcaggccttcagtcagtcct

SEQ ID NO: 153498 - DNA, 20 bp, synthetic construct
  source 1..20: mol_type = other DNA
tgcaggccttcagtcagtcc

SEQ ID NO: 153499 - DNA, 20 bp, synthetic construct
  source 1..20: mol_type = other DNA
atgcaggccttcagtcagtc

SEQ ID NO: 153500 - DNA, 20 bp, synthetic construct
  source 1..20: mol_type = other DNA
catgcaggccttcagtcagt

SEQ ID NO: 153501 - DNA, 20 bp, synthetic construct
  source 1..20: mol_type = other DNA
ccatgcaggccttcagtcag

SEQ ID NO: 153502 - DNA, 20 bp, synthetic construct
  source 1..20: mol_type = other DNA
tccatgcaggccttcagtca

SEQ ID NO: 153503 - DNA, 20 bp, synthetic construct
  source 1..20: mol_type = other DNA
atccatgcaggccttcagtc

SEQ ID NO: 153504 - DNA, 20 bp, synthetic construct
  source 1..20: mol_type = other DNA
aatccatgcaggccttcagt

SEQ ID NO: 153505 - DNA, 20 bp, synthetic construct
  source 1..20: mol_type = other DNA
gaatccatgcaggccttcag

SEQ ID NO: 153506 - DNA, 20 bp, synthetic construct
  source 1..20: mol_type = other DNA
ggaatccatgcaggccttca

SEQ ID NO: 153507 - DNA, 20 bp, synthetic construct
  source 1..20: mol_type = other DNA
tggaatccatgcaggccttc

SEQ ID NO: 153508 - DNA, 20 bp, synthetic construct
  source 1..20: mol_type = other DNA
atggaatccatgcaggcctt

SEQ ID NO: 153509 - DNA, 20 bp, synthetic construct
  source 1..20: mol_type = other DNA
catggaatccatgcaggcct

SEQ ID NO: 153510 - DNA, 20 bp, synthetic construct
  source 1..20: mol_type = other DNA
acatggaatccatgcaggcc

SEQ ID NO: 153511 - DNA, 20 bp, synthetic construct
  source 1..20: mol_type = other DNA
aacatggaatccatgcaggc

SEQ ID NO: 153512 - DNA, 20 bp, synthetic construct
  source 1..20: mol_type = other DNA
gaacatggaatccatgcagg

SEQ ID NO: 153513 - DNA, 20 bp, synthetic construct
  source 1..20: mol_type = other DNA
tgaacatggaatccatgcag

SEQ ID NO: 153514 - DNA, 20 bp, synthetic construct
  source 1..20: mol_type = other DNA
atgaacatggaatccatgca

SEQ ID NO: 153515 - DNA, 20 bp, synthetic construct
  source 1..20: mol_type = other DNA
catgaacatggaatccatgc

SEQ ID NO: 153516 - DNA, 20 bp, synthetic construct
  source 1..20: mol_type = other DNA
tcatgaacatggaatccatg

SEQ ID NO: 153517 - DNA, 20 bp, synthetic construct
  source 1..20: mol_type = other DNA
ctcatgaacatggaatccat

SEQ ID NO: 153518 - DNA, 20 bp, synthetic construct
  source 1..20: mol_type = other DNA
actcatgaacatggaatcca

SEQ ID NO: 153519 - DNA, 20 bp, synthetic construct
  source 1..20: mol_type = other DNA
aactcatgaacatggaatcc

SEQ ID NO: 153520 - DNA, 20 bp, synthetic construct
  source 1..20: mol_type = other DNA
aaactcatgaacatggaatc

SEQ ID NO: 153521 - DNA, 20 bp, synthetic construct
  source 1..20: mol_type = other DNA
caaactcatgaacatggaat

SEQ ID NO: 153522 - DNA, 20 bp, synthetic construct
  source 1..20: mol_type = other DNA
ccaaactcatgaacatggaa

SEQ ID NO: 153523 - DNA, 20 bp, synthetic construct
  source 1..20: mol_type = other DNA
tccaaactcatgaacatgga

SEQ ID NO: 153524 - DNA, 20 bp, synthetic construct
  source 1..20: mol_type = other DNA
ctccaaactcatgaacatgg

SEQ ID NO: 153525 - DNA, 20 bp, synthetic construct
  source 1..20: mol_type = other DNA
tctccaaactcatgaacatg

SEQ ID NO: 153526 - DNA, 20 bp, synthetic construct
  source 1..20: mol_type = other DNA
atctccaaactcatgaacat

SEQ ID NO: 153527 - DNA, 20 bp, synthetic construct
  source 1..20: mol_type = other DNA
tatctccaaactcatgaaca

SEQ ID NO: 153528 - DNA, 20 bp, synthetic construct
  source 1..20: mol_type = other DNA
ttatctccaaactcatgaac

SEQ ID NO: 153529 - DNA, 20 bp, synthetic construct
  source 1..20: mol_type = other DNA
attatctccaaactcatgaa

SEQ ID NO: 153530 - DNA, 20 bp, synthetic construct
  source 1..20: mol_type = other DNA
tattatctccaaactcatga

SEQ ID NO: 153531 - DNA, 20 bp, synthetic construct
  source 1..20: mol_type = other DNA
gtattatctccaaactcatg

SEQ ID NO: 153532 - DNA, 20 bp, synthetic construct
  source 1..20: mol_type = other DNA
tgtattatctccaaactcat

SEQ ID NO: 153533 - DNA, 20 bp, synthetic construct
  source 1..20: mol_type = other DNA
ctgtattatctccaaactca

SEQ ID NO: 153534 - DNA, 20 bp, synthetic construct
  source 1..20: mol_type = other DNA
gctgtattatctccaaactc

SEQ ID NO: 153535 - DNA, 20 bp, synthetic construct
  source 1..20: mol_type = other DNA
tgctgtattatctccaaact

SEQ ID NO: 153536 - DNA, 20 bp, synthetic construct
  source 1..20: mol_type = other DNA
ctgctgtattatctccaaac

SEQ ID NO: 153537 - DNA, 20 bp, synthetic construct
  source 1..20: mol_type = other DNA
cctgctgtattatctccaaa

SEQ ID NO: 153538 - DNA, 20 bp, synthetic construct
  source 1..20: mol_type = other DNA
acctgctgtattatctccaa

SEQ ID NO: 153539 - DNA, 20 bp, synthetic construct
  source 1..20: mol_type = other DNA
cacctgctgtattatctcca

SEQ ID NO: 153540 - DNA, 20 bp, synthetic construct
  source 1..20: mol_type = other DNA
ccacctgctgtattatctcc

SEQ ID NO: 153541 - DNA, 20 bp, synthetic construct
  source 1..20: mol_type = other DNA
cccacctgctgtattatctc

SEQ ID NO: 153542 - DNA, 20 bp, synthetic construct
  source 1..20: mol_type = other DNA
acccacctgctgtattatct

SEQ ID NO: 153543 - DNA, 20 bp, synthetic construct
  source 1..20: mol_type = other DNA
cacccacctgctgtattatc

SEQ ID NO: 153544 - DNA, 20 bp, synthetic construct
  source 1..20: mol_type = other DNA
acacccacctgctgtattat

SEQ ID NO: 153545 - DNA, 20 bp, synthetic construct
  source 1..20: mol_type = other DNA
aacacccacctgctgtatta

SEQ ID NO: 153546 - DNA, 20 bp, synthetic construct
  source 1..20: mol_type = other DNA
caacacccacctgctgtatt

SEQ ID NO: 153547 - DNA, 20 bp, synthetic construct
  source 1..20: mol_type = other DNA
acaacacccacctgctgtat

SEQ ID NO: 153548 - DNA, 20 bp, synthetic construct
  source 1..20: mol_type = other DNA
cacaacacccacctgctgta

SEQ ID NO: 153549 - DNA, 20 bp, synthetic construct
  source 1..20: mol_type = other DNA
gcacaacacccacctgctgt

SEQ ID NO: 153550 - DNA, 20 bp, synthetic construct
  source 1..20: mol_type = other DNA
agcacaacacccacctgctg

SEQ ID NO: 153551 - DNA, 20 bp, synthetic construct
  source 1..20: mol_type = other DNA
cagcacaacacccacctgct

SEQ ID NO: 153552 - DNA, 20 bp, synthetic construct
  source 1..20: mol_type = other DNA
acagcacaacacccacctgc

SEQ ID NO: 153553 - DNA, 20 bp, synthetic construct
  source 1..20: mol_type = other DNA
cacagcacaacacccacctg

SEQ ID NO: 153554 - DNA, 20 bp, synthetic construct
  source 1..20: mol_type = other DNA
gcacagcacaacacccacct

SEQ ID NO: 153555 - DNA, 20 bp, synthetic construct
  source 1..20: mol_type = other DNA
agcacagcacaacacccacc

SEQ ID NO: 153556 - DNA, 20 bp, synthetic construct
  source 1..20: mol_type = other DNA
cagcacagcacaacacccac

SEQ ID NO: 153557 - DNA, 20 bp, synthetic construct
  source 1..20: mol_type = other DNA
ccagcacagcacaacaccca

SEQ ID NO: 153558 - DNA, 20 bp, synthetic construct
  source 1..20: mol_type = other DNA
accagcacagcacaacaccc

SEQ ID NO: 153559 - DNA, 20 bp, synthetic construct
  source 1..20: mol_type = other DNA
caccagcacagcacaacacc

SEQ ID NO: 153560 - DNA, 20 bp, synthetic construct
  source 1..20: mol_type = other DNA
tcaccagcacagcacaacac

SEQ ID NO: 153561 - DNA, 20 bp, synthetic construct
  source 1..20: mol_type = other DNA
gtcaccagcacagcacaaca

SEQ ID NO: 153562 - DNA, 20 bp, synthetic construct
  source 1..20: mol_type = other DNA
ggtcaccagcacagcacaac

SEQ ID NO: 153563 - DNA, 20 bp, synthetic construct
  source 1..20: mol_type = other DNA
gggtcaccagcacagcacaa

SEQ ID NO: 153564 - DNA, 20 bp, synthetic construct
  source 1..20: mol_type = other DNA
tgggtcaccagcacagcaca

SEQ ID NO: 153565 - DNA, 20 bp, synthetic construct
  source 1..20: mol_type = other DNA
atgggtcaccagcacagcac

SEQ ID NO: 153566 - DNA, 20 bp, synthetic construct
  source 1..20: mol_type = other DNA
tatgggtcaccagcacagca

SEQ ID NO: 153567 - DNA, 20 bp, synthetic construct
  source 1..20: mol_type = other DNA
gtatgggtcaccagcacagc

SEQ ID NO: 153568 - DNA, 20 bp, synthetic construct
  source 1..20: mol_type = other DNA
agtatgggtcaccagcacag

SEQ ID NO: 153569 - DNA, 20 bp, synthetic construct
  source 1..20: mol_type = other DNA
aagtatgggtcaccagcaca

SEQ ID NO: 153570 - DNA, 20 bp, synthetic construct
  source 1..20: mol_type = other DNA
caagtatgggtcaccagcac

SEQ ID NO: 153571 - DNA, 20 bp, synthetic construct
  source 1..20: mol_type = other DNA
acaagtatgggtcaccagca

SEQ ID NO: 153572 - DNA, 20 bp, synthetic construct
  source 1..20: mol_type = other DNA
aacaagtatgggtcaccagc

SEQ ID NO: 153573 - DNA, 20 bp, synthetic construct
  source 1..20: mol_type = other DNA
gaacaagtatgggtcaccag

SEQ ID NO: 153574 - DNA, 20 bp, synthetic construct
  source 1..20: mol_type = other DNA
tgaacaagtatgggtcacca

SEQ ID NO: 153575 - DNA, 20 bp, synthetic construct
  source 1..20: mol_type = other DNA
gtgaacaagtatgggtcacc

SEQ ID NO: 153576 - DNA, 20 bp, synthetic construct
  source 1..20: mol_type = other DNA
ggtgaacaagtatgggtcac

SEQ ID NO: 153577 - DNA, 20 bp, synthetic construct
  source 1..20: mol_type = other DNA
gggtgaacaagtatgggtca

SEQ ID NO: 153578 - DNA, 20 bp, synthetic construct
  source 1..20: mol_type = other DNA
agggtgaacaagtatgggtc

SEQ ID NO: 153579 - DNA, 20 bp, synthetic construct
  source 1..20: mol_type = other DNA
tagggtgaacaagtatgggt

SEQ ID NO: 153580 - DNA, 20 bp, synthetic construct
  source 1..20: mol_type = other DNA
ctagggtgaacaagtatggg

SEQ ID NO: 153581 - DNA, 20 bp, synthetic construct
  source 1..20: mol_type = other DNA
actagggtgaacaagtatgg

SEQ ID NO: 153582 - DNA, 20 bp, synthetic construct
  source 1..20: mol_type = other DNA
aactagggtgaacaagtatg

SEQ ID NO: 153583 - DNA, 20 bp, synthetic construct
  source 1..20: mol_type = other DNA
taactagggtgaacaagtat

SEQ ID NO: 153584 - DNA, 20 bp, synthetic construct
  source 1..20: mol_type = other DNA
ctaactagggtgaacaagta

SEQ ID NO: 153585 - DNA, 20 bp, synthetic construct
  source 1..20: mol_type = other DNA
tctaactagggtgaacaagt

SEQ ID NO: 153586 - DNA, 20 bp, synthetic construct
  source 1..20: mol_type = other DNA
atctaactagggtgaacaag

SEQ ID NO: 153587 - DNA, 20 bp, synthetic construct
  source 1..20: mol_type = other DNA
tatctaactagggtgaacaa

SEQ ID NO: 153588 - DNA, 20 bp, synthetic construct
  source 1..20: mol_type = other DNA
ttatctaactagggtgaaca

SEQ ID NO: 153589 - DNA, 20 bp, synthetic construct
  source 1..20: mol_type = other DNA
tttatctaactagggtgaac

SEQ ID NO: 153590 - DNA, 20 bp, synthetic construct
  source 1..20: mol_type = other DNA
gtttatctaactagggtgaa

SEQ ID NO: 153591 - DNA, 20 bp, synthetic construct
  source 1..20: mol_type = other DNA
tgtttatctaactagggtga

SEQ ID NO: 153592 - DNA, 20 bp, synthetic construct
  source 1..20: mol_type = other DNA
ctgtttatctaactagggtg

SEQ ID NO: 153593 - DNA, 20 bp, synthetic construct
  source 1..20: mol_type = other DNA
actgtttatctaactagggt

SEQ ID NO: 153594 - DNA, 20 bp, synthetic construct
  source 1..20: mol_type = other DNA
tactgtttatctaactaggg

SEQ ID NO: 153595 - DNA, 20 bp, synthetic construct
  source 1..20: mol_type = other DNA
ctactgtttatctaactagg

SEQ ID NO: 153596 - DNA, 20 bp, synthetic construct
  source 1..20: mol_type = other DNA
tctactgtttatctaactag

SEQ ID NO: 153597 - DNA, 20 bp, synthetic construct
  source 1..20: mol_type = other DNA
ctctactgtttatctaacta

SEQ ID NO: 153598 - DNA, 20 bp, synthetic construct
  source 1..20: mol_type = other DNA
actctactgtttatctaact

SEQ ID NO: 153599 - DNA, 20 bp, synthetic construct
  source 1..20: mol_type = other DNA
tactctactgtttatctaac

SEQ ID NO: 153600 - DNA, 20 bp, synthetic construct
  source 1..20: mol_type = other DNA
ctactctactgtttatctaa

SEQ ID NO: 153601 - DNA, 20 bp, synthetic construct
  source 1..20: mol_type = other DNA
gctactctactgtttatcta

SEQ ID NO: 153602 - DNA, 20 bp, synthetic construct
  source 1..20: mol_type = other DNA
ggctactctactgtttatct

SEQ ID NO: 153603 - DNA, 20 bp, synthetic construct
  source 1..20: mol_type = other DNA
gggctactctactgtttatc

SEQ ID NO: 153604 - DNA, 20 bp, synthetic construct
  source 1..20: mol_type = other DNA
ggggctactctactgtttat

SEQ ID NO: 153605 - DNA, 20 bp, synthetic construct
  source 1..20: mol_type = other DNA
aggggctactctactgttta

SEQ ID NO: 153606 - DNA, 20 bp, synthetic construct
  source 1..20: mol_type = other DNA
taggggctactctactgttt

SEQ ID NO: 153607 - DNA, 20 bp, synthetic construct
  source 1..20: mol_type = other DNA
ttaggggctactctactgtt

SEQ ID NO: 153608 - DNA, 20 bp, synthetic construct
  source 1..20: mol_type = other DNA
tttaggggctactctactgt

SEQ ID NO: 153609 - DNA, 20 bp, synthetic construct
  source 1..20: mol_type = other DNA
gtttaggggctactctactg

SEQ ID NO: 153610 - DNA, 20 bp, synthetic construct
  source 1..20: mol_type = other DNA
cgtttaggggctactctact

SEQ ID NO: 153611 - DNA, 20 bp, synthetic construct
  source 1..20: mol_type = other DNA
acgtttaggggctactctac

SEQ ID NO: 153612 - DNA, 20 bp, synthetic construct
  source 1..20: mol_type = other DNA
aacgtttaggggctactcta

SEQ ID NO: 153613 - DNA, 20 bp, synthetic construct
  source 1..20: mol_type = other DNA
taacgtttaggggctactct

SEQ ID NO: 153614 - DNA, 20 bp, synthetic construct
  source 1..20: mol_type = other DNA
ttaacgtttaggggctactc

SEQ ID NO: 153615 - DNA, 20 bp, synthetic construct
  source 1..20: mol_type = other DNA
tttaacgtttaggggctact

SEQ ID NO: 153616 - DNA, 20 bp, synthetic construct
  source 1..20: mol_type = other DNA
ttttaacgtttaggggctac

SEQ ID NO: 153617 - DNA, 20 bp, synthetic construct
  source 1..20: mol_type = other DNA
gttttaacgtttaggggcta

SEQ ID NO: 153618 - DNA, 20 bp, synthetic construct
  source 1..20: mol_type = other DNA
ggttttaacgtttaggggct

SEQ ID NO: 153619 - DNA, 20 bp, synthetic construct
  source 1..20: mol_type = other DNA
gggttttaacgtttaggggc

SEQ ID NO: 153620 - DNA, 20 bp, synthetic construct
  source 1..20: mol_type = other DNA
ggggttttaacgtttagggg

SEQ ID NO: 153621 - DNA, 20 bp, synthetic construct
  source 1..20: mol_type = other DNA
aggggttttaacgtttaggg

SEQ ID NO: 153622 - DNA, 20 bp, synthetic construct
  source 1..20: mol_type = other DNA
gaggggttttaacgtttagg

SEQ ID NO: 153623 - DNA, 20 bp, synthetic construct
  source 1..20: mol_type = other DNA
tgaggggttttaacgtttag

SEQ ID NO: 153624 - DNA, 20 bp, synthetic construct
  source 1..20: mol_type = other DNA
ttgaggggttttaacgttta

SEQ ID NO: 153625 - DNA, 20 bp, synthetic construct
  source 1..20: mol_type = other DNA
gttgaggggttttaacgttt

SEQ ID NO: 153626 - DNA, 20 bp, synthetic construct
  source 1..20: mol_type = other DNA
agttgaggggttttaacgtt

SEQ ID NO: 153627 - DNA, 20 bp, synthetic construct
  source 1..20: mol_type = other DNA
aagttgaggggttttaacgt

SEQ ID NO: 153628 - DNA, 20 bp, synthetic construct
  source 1..20: mol_type = other DNA
caagttgaggggttttaacg

SEQ ID NO: 153629 - DNA, 20 bp, synthetic construct
  source 1..20: mol_type = other DNA
acaagttgaggggttttaac

SEQ ID NO: 153630 - DNA, 20 bp, synthetic construct
  source 1..20: mol_type = other DNA
aacaagttgaggggttttaa

SEQ ID NO: 153631 - DNA, 20 bp, synthetic construct
  source 1..20: mol_type = other DNA
aaacaagttgaggggtttta

SEQ ID NO: 153632 - DNA, 20 bp, synthetic construct
  source 1..20: mol_type = other DNA
aaaacaagttgaggggtttt

SEQ ID NO: 153633 - DNA, 20 bp, synthetic construct
  source 1..20: mol_type = other DNA
aaaaacaagttgaggggttt

SEQ ID NO: 153634 - DNA, 20 bp, synthetic construct
  source 1..20: mol_type = other DNA
caaaaacaagttgaggggtt

SEQ ID NO: 153635 - DNA, 20 bp, synthetic construct
  source 1..20: mol_type = other DNA
acaaaaacaagttgaggggt

SEQ ID NO: 153636 - DNA, 20 bp, synthetic construct
  source 1..20: mol_type = other DNA
aacaaaaacaagttgagggg

SEQ ID NO: 153637 - DNA, 20 bp, synthetic construct
  source 1..20: mol_type = other DNA
aaacaaaaacaagttgaggg

SEQ ID NO: 153638 - DNA, 20 bp, synthetic construct
  source 1..20: mol_type = other DNA
aaaacaaaaacaagttgagg

SEQ ID NO: 153639 - DNA, 20 bp, synthetic construct
  source 1..20: mol_type = other DNA
aaaaacaaaaacaagttgag

SEQ ID NO: 153640 - DNA, 20 bp, synthetic construct
  source 1..20: mol_type = other DNA
caaaaacaaaaacaagttga

SEQ ID NO: 153641 - DNA, 20 bp, synthetic construct
  source 1..20: mol_type = other DNA
tcaaaaacaaaaacaagttg

SEQ ID NO: 153642 - DNA, 20 bp, synthetic construct
  source 1..20: mol_type = other DNA
ctcaaaaacaaaaacaagtt

SEQ ID NO: 153643 - DNA, 20 bp, synthetic construct
  source 1..20: mol_type = other DNA
tctcaaaaacaaaaacaagt

SEQ ID NO: 153644 - DNA, 20 bp, synthetic construct
  source 1..20: mol_type = other DNA
ttctcaaaaacaaaaacaag

SEQ ID NO: 153645 - DNA, 20 bp, synthetic construct
  source 1..20: mol_type = other DNA
tttctcaaaaacaaaaacaa

SEQ ID NO: 153646 - DNA, 20 bp, synthetic construct
  source 1..20: mol_type = other DNA
ctttctcaaaaacaaaaaca

SEQ ID NO: 153647 - DNA, 20 bp, synthetic construct
  source 1..20: mol_type = other DNA
cctttctcaaaaacaaaaac

SEQ ID NO: 153648 - DNA, 20 bp, synthetic construct
  source 1..20: mol_type = other DNA
ccctttctcaaaaacaaaaa

SEQ ID NO: 153649 - DNA, 20 bp, synthetic construct
  source 1..20: mol_type = other DNA
accctttctcaaaaacaaaa

SEQ ID NO: 153650 - DNA, 20 bp, synthetic construct
  source 1..20: mol_type = other DNA
gaccctttctcaaaaacaaa

SEQ ID NO: 153651 - DNA, 20 bp, synthetic construct
  source 1..20: mol_type = other DNA
agaccctttctcaaaaacaa

SEQ ID NO: 153652 - DNA, 20 bp, synthetic construct
  source 1..20: mol_type = other DNA
aagaccctttctcaaaaaca

SEQ ID NO: 153653 - DNA, 20 bp, synthetic construct
  source 1..20: mol_type = other DNA
caagaccctttctcaaaaac

SEQ ID NO: 153654 - DNA, 20 bp, synthetic construct
  source 1..20: mol_type = other DNA
gcaagaccctttctcaaaaa

SEQ ID NO: 153655 - DNA, 20 bp, synthetic construct
  source 1..20: mol_type = other DNA
agcaagaccctttctcaaaa

SEQ ID NO: 153656 - DNA, 20 bp, synthetic construct
  source 1..20: mol_type = other DNA
gagcaagaccctttctcaaa

SEQ ID NO: 153657 - DNA, 20 bp, synthetic construct
  source 1..20: mol_type = other DNA
agagcaagaccctttctcaa

SEQ ID NO: 153658 - DNA, 20 bp, synthetic construct
  source 1..20: mol_type = other DNA
cagagcaagaccctttctca

SEQ ID NO: 153659 - DNA, 20 bp, synthetic construct
  source 1..20: mol_type = other DNA
acagagcaagaccctttctc

SEQ ID NO: 153660 - DNA, 20 bp, synthetic construct
  source 1..20: mol_type = other DNA
gacagagcaagaccctttct

SEQ ID NO: 153661 - DNA, 20 bp, synthetic construct
  source 1..20: mol_type = other DNA
cgacagagcaagaccctttc

SEQ ID NO: 153662 - DNA, 20 bp, synthetic construct
  source 1..20: mol_type = other DNA
gcgacagagcaagacccttt

SEQ ID NO: 153663 - DNA, 20 bp, synthetic construct
  source 1..20: mol_type = other DNA
agcgacagagcaagaccctt

SEQ ID NO: 153664 - DNA, 20 bp, synthetic construct
  source 1..20: mol_type = other DNA
gagcgacagagcaagaccct

SEQ ID NO: 153665 - DNA, 20 bp, synthetic construct
  source 1..20: mol_type = other DNA
tgagcgacagagcaagaccc

SEQ ID NO: 153666 - DNA, 20 bp, synthetic construct
  source 1..20: mol_type = other DNA
ctgagcgacagagcaagacc

SEQ ID NO: 153667 - DNA, 20 bp, synthetic construct
  source 1..20: mol_type = other DNA
cctgagcgacagagcaagac

SEQ ID NO: 153668 - DNA, 20 bp, synthetic construct
  source 1..20: mol_type = other DNA
gcctgagcgacagagcaaga

SEQ ID NO: 153669 - DNA, 20 bp, synthetic construct
  source 1..20: mol_type = other DNA
agcctgagcgacagagcaag

SEQ ID NO: 153670 - DNA, 20 bp, synthetic construct
  source 1..20: mol_type = other DNA
cagcctgagcgacagagcaa

SEQ ID NO: 153671 - DNA, 20 bp, synthetic construct
  source 1..20: mol_type = other DNA
ccagcctgagcgacagagca

SEQ ID NO: 153672 - DNA, 20 bp, synthetic construct
  source 1..20: mol_type = other DNA
tccagcctgagcgacagagc

SEQ ID NO: 153673 - DNA, 20 bp, synthetic construct
  source 1..20: mol_type = other DNA
ctccagcctgagcgacagag

SEQ ID NO: 153674 - DNA, 20 bp, synthetic construct
  source 1..20: mol_type = other DNA
actccagcctgagcgacaga

SEQ ID NO: 153675 - DNA, 20 bp, synthetic construct
  source 1..20: mol_type = other DNA
cactccagcctgagcgacag

SEQ ID NO: 153676 - DNA, 20 bp, synthetic construct
  source 1..20: mol_type = other DNA
gcactccagcctgagcgaca

SEQ ID NO: 153677 - DNA, 20 bp, synthetic construct
  source 1..20: mol_type = other DNA
tgcactccagcctgagcgac

SEQ ID NO: 153678 - DNA, 20 bp, synthetic construct
  source 1..20: mol_type = other DNA
ctgcactccagcctgagcga

SEQ ID NO: 153679 - DNA, 20 bp, synthetic construct
  source 1..20: mol_type = other DNA
actgcactccagcctgagcg

SEQ ID NO: 153680 - DNA, 20 bp, synthetic construct
  source 1..20: mol_type = other DNA
cactgcactccagcctgagc

SEQ ID NO: 153681 - DNA, 20 bp, synthetic construct
  source 1..20: mol_type = other DNA
ccactgcactccagcctgag

SEQ ID NO: 153682 - DNA, 20 bp, synthetic construct
  source 1..20: mol_type = other DNA
gccactgcactccagcctga

SEQ ID NO: 153683 - DNA, 20 bp, synthetic construct
  source 1..20: mol_type = other DNA
cgccactgcactccagcctg

SEQ ID NO: 153684 - DNA, 20 bp, synthetic construct
  source 1..20: mol_type = other DNA
gcgccactgcactccagcct

SEQ ID NO: 153685 - DNA, 20 bp, synthetic construct
  source 1..20: mol_type = other DNA
agcgccactgcactccagcc

SEQ ID NO: 153686 - DNA, 20 bp, synthetic construct
  source 1..20: mol_type = other DNA
cagcgccactgcactccagc

SEQ ID NO: 153687 - DNA, 20 bp, synthetic construct
  source 1..20: mol_type = other DNA
acagcgccactgcactccag

SEQ ID NO: 153688 - DNA, 20 bp, synthetic construct
  source 1..20: mol_type = other DNA
cacagcgccactgcactcca

SEQ ID NO: 153689 - DNA, 20 bp, synthetic construct
  source 1..20: mol_type = other DNA
gcacagcgccactgcactcc

SEQ ID NO: 153690 - DNA, 20 bp, synthetic construct
  source 1..20: mol_type = other DNA
cgcacagcgccactgcactc

SEQ ID NO: 153691 - DNA, 20 bp, synthetic construct
  source 1..20: mol_type = other DNA
tcgcacagcgccactgcact

SEQ ID NO: 153692 - DNA, 20 bp, synthetic construct
  source 1..20: mol_type = other DNA
atcgcacagcgccactgcac

SEQ ID NO: 153693 - DNA, 20 bp, synthetic construct
  source 1..20: mol_type = other DNA
gatcgcacagcgccactgca

SEQ ID NO: 153694 - DNA, 20 bp, synthetic construct
  source 1..20: mol_type = other DNA
tgatcgcacagcgccactgc

SEQ ID NO: 153695 - DNA, 20 bp, synthetic construct
  source 1..20: mol_type = other DNA
atgatcgcacagcgccactg

SEQ ID NO: 153696 - DNA, 20 bp, synthetic construct
  source 1..20: mol_type = other DNA
catgatcgcacagcgccact

SEQ ID NO: 153697 - DNA, 20 bp, synthetic construct
  source 1..20: mol_type = other DNA
ccatgatcgcacagcgccac

SEQ ID NO: 153698 - DNA, 20 bp, synthetic construct
  source 1..20: mol_type = other DNA
gccatgatcgcacagcgcca

SEQ ID NO: 153699 - DNA, 20 bp, synthetic construct
  source 1..20: mol_type = other DNA
agccatgatcgcacagcgcc

SEQ ID NO: 153700 - DNA, 20 bp, synthetic construct
  source 1..20: mol_type = other DNA
cagccatgatcgcacagcgc

SEQ ID NO: 153701 - DNA, 20 bp, synthetic construct
  source 1..20: mol_type = other DNA
tcagccatgatcgcacagcg

SEQ ID NO: 153702 - DNA, 20 bp, synthetic construct
  source 1..20: mol_type = other DNA
gtcagccatgatcgcacagc

SEQ ID NO: 153703 - DNA, 20 bp, synthetic construct
  source 1..20: mol_type = other DNA
ggtcagccatgatcgcacag

SEQ ID NO: 153704 - DNA, 20 bp, synthetic construct
  source 1..20: mol_type = other DNA
aggtcagccatgatcgcaca

SEQ ID NO: 153705 - DNA, 20 bp, synthetic construct
  source 1..20: mol_type = other DNA
aaggtcagccatgatcgcac

SEQ ID NO: 153706 - DNA, 20 bp, synthetic construct
  source 1..20: mol_type = other DNA
taaggtcagccatgatcgca

SEQ ID NO: 153707 - DNA, 20 bp, synthetic construct
  source 1..20: mol_type = other DNA
ctaaggtcagccatgatcgc

SEQ ID NO: 153708 - DNA, 20 bp, synthetic construct
  source 1..20: mol_type = other DNA
gctaaggtcagccatgatcg

SEQ ID NO: 153709 - DNA, 20 bp, synthetic construct
  source 1..20: mol_type = other DNA
ggctaaggtcagccatgatc

SEQ ID NO: 153710 - DNA, 20 bp, synthetic construct
  source 1..20: mol_type = other DNA
aggctaaggtcagccatgat

SEQ ID NO: 153711 - DNA, 20 bp, synthetic construct
  source 1..20: mol_type = other DNA
aaggctaaggtcagccatga

SEQ ID NO: 153712 - DNA, 20 bp, synthetic construct
  source 1..20: mol_type = other DNA
caaggctaaggtcagccatg

SEQ ID NO: 153713 - DNA, 20 bp, synthetic construct
  source 1..20: mol_type = other DNA
tcaaggctaaggtcagccat

SEQ ID NO: 153714 - DNA, 20 bp, synthetic construct
  source 1..20: mol_type = other DNA
gtcaaggctaaggtcagcca

SEQ ID NO: 153715 - DNA, 20 bp, synthetic construct
  source 1..20: mol_type = other DNA
ggtcaaggctaaggtcagcc

SEQ ID NO: 153716 - DNA, 20 bp, synthetic construct
  source 1..20: mol_type = other DNA
aggtcaaggctaaggtcagc

SEQ ID NO: 153717 - DNA, 20 bp, synthetic construct
  source 1..20: mol_type = other DNA
gaggtcaaggctaaggtcag

SEQ ID NO: 153718 - DNA, 20 bp, synthetic construct
  source 1..20: mol_type = other DNA
ggaggtcaaggctaaggtca

SEQ ID NO: 153719 - DNA, 20 bp, synthetic construct
  source 1..20: mol_type = other DNA
gggaggtcaaggctaaggtc

SEQ ID NO: 153720 - DNA, 20 bp, synthetic construct
  source 1..20: mol_type = other DNA
tgggaggtcaaggctaaggt

SEQ ID NO: 153721 - DNA, 20 bp, synthetic construct
  source 1..20: mol_type = other DNA
ctgggaggtcaaggctaagg

SEQ ID NO: 153722 - DNA, 20 bp, synthetic construct
  source 1..20: mol_type = other DNA
cctgggaggtcaaggctaag

SEQ ID NO: 153723 - DNA, 20 bp, synthetic construct
  source 1..20: mol_type = other DNA
gcctgggaggtcaaggctaa

SEQ ID NO: 153724 - DNA, 20 bp, synthetic construct
  source 1..20: mol_type = other DNA
agcctgggaggtcaaggcta

SEQ ID NO: 153725 - DNA, 20 bp, synthetic construct
  source 1..20: mol_type = other DNA
gagcctgggaggtcaaggct

SEQ ID NO: 153726 - DNA, 20 bp, synthetic construct
  source 1..20: mol_type = other DNA
ggagcctgggaggtcaaggc

SEQ ID NO: 153727 - DNA, 20 bp, synthetic construct
  source 1..20: mol_type = other DNA
tggagcctgggaggtcaagg

SEQ ID NO: 153728 - DNA, 20 bp, synthetic construct
  source 1..20: mol_type = other DNA
atggagcctgggaggtcaag

SEQ ID NO: 153729 - DNA, 20 bp, synthetic construct
  source 1..20: mol_type = other DNA
aatggagcctgggaggtcaa

SEQ ID NO: 153730 - DNA, 20 bp, synthetic construct
  source 1..20: mol_type = other DNA
caatggagcctgggaggtca

SEQ ID NO: 153731 - DNA, 20 bp, synthetic construct
  source 1..20: mol_type = other DNA
tcaatggagcctgggaggtc

SEQ ID NO: 153732 - DNA, 20 bp, synthetic construct
  source 1..20: mol_type = other DNA
atcaatggagcctgggaggt

SEQ ID NO: 153733 - DNA, 20 bp, synthetic construct
  source 1..20: mol_type = other DNA
gatcaatggagcctgggagg

SEQ ID NO: 153734 - DNA, 20 bp, synthetic construct
  source 1..20: mol_type = other DNA
ggatcaatggagcctgggag

SEQ ID NO: 153735 - DNA, 20 bp, synthetic construct
  source 1..20: mol_type = other DNA
aggatcaatggagcctggga

SEQ ID NO: 153736 - DNA, 20 bp, synthetic construct
  source 1..20: mol_type = other DNA
gaggatcaatggagcctggg

SEQ ID NO: 153737 - DNA, 20 bp, synthetic construct
  source 1..20: mol_type = other DNA
tgaggatcaatggagcctgg

SEQ ID NO: 153738 - DNA, 20 bp, synthetic construct
  source 1..20: mol_type = other DNA
atgaggatcaatggagcctg

SEQ ID NO: 153739 - DNA, 20 bp, synthetic construct
  source 1..20: mol_type = other DNA
catgaggatcaatggagcct

SEQ ID NO: 153740 - DNA, 20 bp, synthetic construct
  source 1..20: mol_type = other DNA
gcatgaggatcaatggagcc

SEQ ID NO: 153741 - DNA, 20 bp, synthetic construct
  source 1..20: mol_type = other DNA
ggcatgaggatcaatggagc

SEQ ID NO: 153742 - DNA, 20 bp, synthetic construct
  source 1..20: mol_type = other DNA
aggcatgaggatcaatggag

SEQ ID NO: 153743 - DNA, 20 bp, synthetic construct
  source 1..20: mol_type = other DNA
aaggcatgaggatcaatgga

SEQ ID NO: 153744 - DNA, 20 bp, synthetic construct
  source 1..20: mol_type = other DNA
caaggcatgaggatcaatgg

SEQ ID NO: 153745 - DNA, 20 bp, synthetic construct
  source 1..20: mol_type = other DNA
ccaaggcatgaggatcaatg

SEQ ID NO: 153746 - DNA, 20 bp, synthetic construct
  source 1..20: mol_type = other DNA
gccaaggcatgaggatcaat

SEQ ID NO: 153747 - DNA, 20 bp, synthetic construct
  source 1..20: mol_type = other DNA
ggccaaggcatgaggatcaa

SEQ ID NO: 153748 - DNA, 20 bp, synthetic construct
  source 1..20: mol_type = other DNA
gggccaaggcatgaggatca

SEQ ID NO: 153749 - DNA, 20 bp, synthetic construct
  source 1..20: mol_type = other DNA
cgggccaaggcatgaggatc

SEQ ID NO: 153750 - DNA, 20 bp, synthetic construct
  source 1..20: mol_type = other DNA
acgggccaaggcatgaggat

SEQ ID NO: 153751 - DNA, 20 bp, synthetic construct
  source 1..20: mol_type = other DNA
tacgggccaaggcatgagga

SEQ ID NO: 153752 - DNA, 20 bp, synthetic construct
  source 1..20: mol_type = other DNA
ctacgggccaaggcatgagg

SEQ ID NO: 153753 - DNA, 20 bp, synthetic construct
  source 1..20: mol_type = other DNA
gctacgggccaaggcatgag

SEQ ID NO: 153754 - DNA, 20 bp, synthetic construct
  source 1..20: mol_type = other DNA
agctacgggccaaggcatga

SEQ ID NO: 153755 - DNA, 20 bp, synthetic construct
  source 1..20: mol_type = other DNA
cagctacgggccaaggcatg

SEQ ID NO: 153756 - DNA, 20 bp, synthetic construct
  source 1..20: mol_type = other DNA
ccagctacgggccaaggcat

SEQ ID NO: 153757 - DNA, 20 bp, synthetic construct
  source 1..20: mol_type = other DNA
cccagctacgggccaaggca

SEQ ID NO: 153758 - DNA, 20 bp, synthetic construct
  source 1..20: mol_type = other DNA
tcccagctacgggccaaggc

SEQ ID NO: 153759 - DNA, 20 bp, synthetic construct
  source 1..20: mol_type = other DNA
gtcccagctacgggccaagg

SEQ ID NO: 153760 - DNA, 20 bp, synthetic construct
  source 1..20: mol_type = other DNA
agtcccagctacgggccaag

SEQ ID NO: 153761 - DNA, 20 bp, synthetic construct
  source 1..20: mol_type = other DNA
tagtcccagctacgggccaa

SEQ ID NO: 153762 - DNA, 20 bp, synthetic construct
  source 1..20: mol_type = other DNA
gtagtcccagctacgggcca

SEQ ID NO: 153763 - DNA, 20 bp, synthetic construct
  source 1..20: mol_type = other DNA
tgtagtcccagctacgggcc

SEQ ID NO: 153764 - DNA, 20 bp, synthetic construct
  source 1..20: mol_type = other DNA
ctgtagtcccagctacgggc

SEQ ID NO: 153765 - DNA, 20 bp, synthetic construct
  source 1..20: mol_type = other DNA
cctgtagtcccagctacggg

SEQ ID NO: 153766 - DNA, 20 bp, synthetic construct
  source 1..20: mol_type = other DNA
acctgtagtcccagctacgg

SEQ ID NO: 153767 - DNA, 20 bp, synthetic construct
  source 1..20: mol_type = other DNA
tacctgtagtcccagctacg

SEQ ID NO: 153768 - DNA, 20 bp, synthetic construct
  source 1..20: mol_type = other DNA
gtacctgtagtcccagctac

SEQ ID NO: 153769 - DNA, 20 bp, synthetic construct
  source 1..20: mol_type = other DNA
tgtacctgtagtcccagcta

SEQ ID NO: 153770 - DNA, 20 bp, synthetic construct
  source 1..20: mol_type = other DNA
gtgtacctgtagtcccagct

SEQ ID NO: 153771 - DNA, 20 bp, synthetic construct
  source 1..20: mol_type = other DNA
tgtgtacctgtagtcccagc

SEQ ID NO: 153772 - DNA, 20 bp, synthetic construct
  source 1..20: mol_type = other DNA
gtgtgtacctgtagtcccag

SEQ ID NO: 153773 - DNA, 20 bp, synthetic construct
  source 1..20: mol_type = other DNA
ggtgtgtacctgtagtccca

SEQ ID NO: 153774 - DNA, 20 bp, synthetic construct
  source 1..20: mol_type = other DNA
tggtgtgtacctgtagtccc

SEQ ID NO: 153775 - DNA, 20 bp, synthetic construct
  source 1..20: mol_type = other DNA
gtggtgtgtacctgtagtcc

SEQ ID NO: 153776 - DNA, 20 bp, synthetic construct
  source 1..20: mol_type = other DNA
ggtggtgtgtacctgtagtc

SEQ ID NO: 153777 - DNA, 20 bp, synthetic construct
  source 1..20: mol_type = other DNA
tggtggtgtgtacctgtagt

SEQ ID NO: 153778 - DNA, 20 bp, synthetic construct
  source 1..20: mol_type = other DNA
gtggtggtgtgtacctgtag

SEQ ID NO: 153779 - DNA, 20 bp, synthetic construct
  source 1..20: mol_type = other DNA
cgtggtggtgtgtacctgta

SEQ ID NO: 153780 - DNA, 20 bp, synthetic construct
  source 1..20: mol_type = other DNA
gcgtggtggtgtgtacctgt

SEQ ID NO: 153781 - DNA, 20 bp, synthetic construct
  source 1..20: mol_type = other DNA
ggcgtggtggtgtgtacctg

SEQ ID NO: 153782 - DNA, 20 bp, synthetic construct
  source 1..20: mol_type = other DNA
aggcgtggtggtgtgtacct

SEQ ID NO: 153783 - DNA, 20 bp, synthetic construct
  source 1..20: mol_type = other DNA
caggcgtggtggtgtgtacc

SEQ ID NO: 153784 - DNA, 20 bp, synthetic construct
  source 1..20: mol_type = other DNA
ccaggcgtggtggtgtgtac

SEQ ID NO: 153785 - DNA, 20 bp, synthetic construct
  source 1..20: mol_type = other DNA
gccaggcgtggtggtgtgta

SEQ ID NO: 153786 - DNA, 20 bp, synthetic construct
  source 1..20: mol_type = other DNA
agccaggcgtggtggtgtgt

SEQ ID NO: 153787 - DNA, 20 bp, synthetic construct
  source 1..20: mol_type = other DNA
tagccaggcgtggtggtgtg

SEQ ID NO: 153788 - DNA, 20 bp, synthetic construct
  source 1..20: mol_type = other DNA
ttagccaggcgtggtggtgt

SEQ ID NO: 153789 - DNA, 20 bp, synthetic construct
  source 1..20: mol_type = other DNA
attagccaggcgtggtggtg

SEQ ID NO: 153790 - DNA, 20 bp, synthetic construct
  source 1..20: mol_type = other DNA
aattagccaggcgtggtggt

SEQ ID NO: 153791 - DNA, 20 bp, synthetic construct
  source 1..20: mol_type = other DNA
aaattagccaggcgtggtgg

SEQ ID NO: 153792 - DNA, 20 bp, synthetic construct
  source 1..20: mol_type = other DNA
aaaattagccaggcgtggtg

SEQ ID NO: 153793 - DNA, 20 bp, synthetic construct
  source 1..20: mol_type = other DNA
aaaaattagccaggcgtggt

SEQ ID NO: 153794 - DNA, 20 bp, synthetic construct
  source 1..20: mol_type = other DNA
caaaaattagccaggcgtgg

SEQ ID NO: 153795 - DNA, 20 bp, synthetic construct
  source 1..20: mol_type = other DNA
acaaaaattagccaggcgtg

SEQ ID NO: 153796 - DNA, 20 bp, synthetic construct
  source 1..20: mol_type = other DNA
tacaaaaattagccaggcgt

SEQ ID NO: 153797 - DNA, 20 bp, synthetic construct
  source 1..20: mol_type = other DNA
atacaaaaattagccaggcg

SEQ ID NO: 153798 - DNA, 20 bp, synthetic construct
  source 1..20: mol_type = other DNA
aatacaaaaattagccaggc

SEQ ID NO: 153799 - DNA, 20 bp, synthetic construct
  source 1..20: mol_type = other DNA
aaatacaaaaattagccagg

SEQ ID NO: 153800 - DNA, 20 bp, synthetic construct
  source 1..20: mol_type = other DNA
aaaatacaaaaattagccag

SEQ ID NO: 153801 - DNA, 20 bp, synthetic construct
  source 1..20: mol_type = other DNA
aaaaatacaaaaattagcca

SEQ ID NO: 153802 - DNA, 20 bp, synthetic construct
  source 1..20: mol_type = other DNA
aaaaaatacaaaaattagcc

SEQ ID NO: 153803 - DNA, 20 bp, synthetic construct
  source 1..20: mol_type = other DNA
aaaaaaatacaaaaattagc

SEQ ID NO: 153804 - DNA, 20 bp, synthetic construct
  source 1..20: mol_type = other DNA
gaaaaaaatacaaaaattag

SEQ ID NO: 153805 - DNA, 20 bp, synthetic construct
  source 1..20: mol_type = other DNA
agaaaaaaatacaaaaatta

SEQ ID NO: 153806 - DNA, 20 bp, synthetic construct
  source 1..20: mol_type = other DNA
tagaaaaaaatacaaaaatt

SEQ ID NO: 153807 - DNA, 20 bp, synthetic construct
  source 1..20: mol_type = other DNA
ctagaaaaaaatacaaaaat

SEQ ID NO: 153808 - DNA, 20 bp, synthetic construct
  source 1..20: mol_type = other DNA
tctagaaaaaaatacaaaaa

SEQ ID NO: 153809 - DNA, 20 bp, synthetic construct
  source 1..20: mol_type = other DNA
ctctagaaaaaaatacaaaa

SEQ ID NO: 153810 - DNA, 20 bp, synthetic construct
  source 1..20: mol_type = other DNA
cctctagaaaaaaatacaaa

SEQ ID NO: 153811 - DNA, 20 bp, synthetic construct
  source 1..20: mol_type = other DNA
acctctagaaaaaaatacaa

SEQ ID NO: 153812 - DNA, 20 bp, synthetic construct
  source 1..20: mol_type = other DNA
cacctctagaaaaaaataca

SEQ ID NO: 153813 - DNA, 20 bp, synthetic construct
  source 1..20: mol_type = other DNA
ccacctctagaaaaaaatac

SEQ ID NO: 153814 - DNA, 20 bp, synthetic construct
  source 1..20: mol_type = other DNA
cccacctctagaaaaaaata

SEQ ID NO: 153815 - DNA, 20 bp, synthetic construct
  source 1..20: mol_type = other DNA
ccccacctctagaaaaaaat

SEQ ID NO: 153816 - DNA, 20 bp, synthetic construct
  source 1..20: mol_type = other DNA
accccacctctagaaaaaaa

SEQ ID NO: 153817 - DNA, 20 bp, synthetic construct
  source 1..20: mol_type = other DNA
aaccccacctctagaaaaaa

SEQ ID NO: 153818 - DNA, 20 bp, synthetic construct
  source 1..20: mol_type = other DNA
aaaccccacctctagaaaaa

SEQ ID NO: 153819 - DNA, 20 bp, synthetic construct
  source 1..20: mol_type = other DNA
gaaaccccacctctagaaaa

SEQ ID NO: 153820 - DNA, 20 bp, synthetic construct
  source 1..20: mol_type = other DNA
tgaaaccccacctctagaaa

SEQ ID NO: 153821 - DNA, 20 bp, synthetic construct
  source 1..20: mol_type = other DNA
atgaaaccccacctctagaa

SEQ ID NO: 153822 - DNA, 20 bp, synthetic construct
  source 1..20: mol_type = other DNA
gatgaaaccccacctctaga

SEQ ID NO: 153823 - DNA, 20 bp, synthetic construct
  source 1..20: mol_type = other DNA
tgatgaaaccccacctctag

SEQ ID NO: 153824 - DNA, 20 bp, synthetic construct
  source 1..20: mol_type = other DNA
atgatgaaaccccacctcta

SEQ ID NO: 153825 - DNA, 20 bp, synthetic construct
  source 1..20: mol_type = other DNA
catgatgaaaccccacctct

SEQ ID NO: 153826 - DNA, 20 bp, synthetic construct
  source 1..20: mol_type = other DNA
acatgatgaaaccccacctc

SEQ ID NO: 153827 - DNA, 20 bp, synthetic construct
  source 1..20: mol_type = other DNA
aacatgatgaaaccccacct

SEQ ID NO: 153828 - DNA, 20 bp, synthetic construct
  source 1..20: mol_type = other DNA
caacatgatgaaaccccacc

SEQ ID NO: 153829 - DNA, 20 bp, synthetic construct
  source 1..20: mol_type = other DNA
gcaacatgatgaaaccccac

SEQ ID NO: 153830 - DNA, 20 bp, synthetic construct
  source 1..20: mol_type = other DNA
ggcaacatgatgaaacccca

SEQ ID NO: 153831 - DNA, 20 bp, synthetic construct
  source 1..20: mol_type = other DNA
gggcaacatgatgaaacccc

SEQ ID NO: 153832 - DNA, 20 bp, synthetic construct
  source 1..20: mol_type = other DNA
tgggcaacatgatgaaaccc

SEQ ID NO: 153833 - DNA, 20 bp, synthetic construct
  source 1..20: mol_type = other DNA
ctgggcaacatgatgaaacc

SEQ ID NO: 153834 - DNA, 20 bp, synthetic construct
  source 1..20: mol_type = other DNA
cctgggcaacatgatgaaac

SEQ ID NO: 153835 - DNA, 20 bp, synthetic construct
  source 1..20: mol_type = other DNA
gcctgggcaacatgatgaaa

SEQ ID NO: 153836 - DNA, 20 bp, synthetic construct
  source 1..20: mol_type = other DNA
agcctgggcaacatgatgaa

SEQ ID NO: 153837 - DNA, 20 bp, synthetic construct
  source 1..20: mol_type = other DNA
cagcctgggcaacatgatga

SEQ ID NO: 153838 - DNA, 20 bp, synthetic construct
  source 1..20: mol_type = other DNA
ccagcctgggcaacatgatg

SEQ ID NO: 153839 - DNA, 20 bp, synthetic construct
  source 1..20: mol_type = other DNA
accagcctgggcaacatgat

SEQ ID NO: 153840 - DNA, 20 bp, synthetic construct
  source 1..20: mol_type = other DNA
gaccagcctgggcaacatga

SEQ ID NO: 153841 - DNA, 20 bp, synthetic construct
  source 1..20: mol_type = other DNA
agaccagcctgggcaacatg

SEQ ID NO: 153842 - DNA, 20 bp, synthetic construct
  source 1..20: mol_type = other DNA
aagaccagcctgggcaacat

SEQ ID NO: 153843 - DNA, 20 bp, synthetic construct
  source 1..20: mol_type = other DNA
caagaccagcctgggcaaca

SEQ ID NO: 153844 - DNA, 20 bp, synthetic construct
  source 1..20: mol_type = other DNA
tcaagaccagcctgggcaac

SEQ ID NO: 153845 - DNA, 20 bp, synthetic construct
  source 1..20: mol_type = other DNA
ttcaagaccagcctgggcaa

SEQ ID NO: 153846 - DNA, 20 bp, synthetic construct
  source 1..20: mol_type = other DNA
gttcaagaccagcctgggca

SEQ ID NO: 153847 - DNA, 20 bp, synthetic construct
  source 1..20: mol_type = other DNA
agttcaagaccagcctgggc

SEQ ID NO: 153848 - DNA, 20 bp, synthetic construct
  source 1..20: mol_type = other DNA
cagttcaagaccagcctggg

SEQ ID NO: 153849 - DNA, 20 bp, synthetic construct
  source 1..20: mol_type = other DNA
gcagttcaagaccagcctgg

SEQ ID NO: 153850 - DNA, 20 bp, synthetic construct
  source 1..20: mol_type = other DNA
agcagttcaagaccagcctg

SEQ ID NO: 153851 - DNA, 20 bp, synthetic construct
  source 1..20: mol_type = other DNA
cagcagttcaagaccagcct

SEQ ID NO: 153852 - DNA, 20 bp, synthetic construct
  source 1..20: mol_type = other DNA
ccagcagttcaagaccagcc

SEQ ID NO: 153853 - DNA, 20 bp, synthetic construct
  source 1..20: mol_type = other DNA
cccagcagttcaagaccagc

SEQ ID NO: 153854 - DNA, 20 bp, synthetic construct
  source 1..20: mol_type = other DNA
gcccagcagttcaagaccag

SEQ ID NO: 153855 - DNA, 20 bp, synthetic construct
  source 1..20: mol_type = other DNA
agcccagcagttcaagacca

SEQ ID NO: 153856 - DNA, 20 bp, synthetic construct
  source 1..20: mol_type = other DNA
gagcccagcagttcaagacc

SEQ ID NO: 153857 - DNA, 20 bp, synthetic construct
  source 1..20: mol_type = other DNA
tgagcccagcagttcaagac

SEQ ID NO: 153858 - DNA, 20 bp, synthetic construct
  source 1..20: mol_type = other DNA
ttgagcccagcagttcaaga

SEQ ID NO: 153859 - DNA, 20 bp, synthetic construct
  source 1..20: mol_type = other DNA
cttgagcccagcagttcaag

SEQ ID NO: 153860 - DNA, 20 bp, synthetic construct
  source 1..20: mol_type = other DNA
acttgagcccagcagttcaa

SEQ ID NO: 153861 - DNA, 20 bp, synthetic construct
  source 1..20: mol_type = other DNA
cacttgagcccagcagttca

SEQ ID NO: 153862 - DNA, 20 bp, synthetic construct
  source 1..20: mol_type = other DNA
ccacttgagcccagcagttc

SEQ ID NO: 153863 - DNA, 20 bp, synthetic construct
  source 1..20: mol_type = other DNA
accacttgagcccagcagtt

SEQ ID NO: 153864 - DNA, 20 bp, synthetic construct
  source 1..20: mol_type = other DNA
gaccacttgagcccagcagt

SEQ ID NO: 153865 - DNA, 20 bp, synthetic construct
  source 1..20: mol_type = other DNA
agaccacttgagcccagcag

SEQ ID NO: 153866 - DNA, 20 bp, synthetic construct
  source 1..20: mol_type = other DNA
tagaccacttgagcccagca

SEQ ID NO: 153867 - DNA, 20 bp, synthetic construct
  source 1..20: mol_type = other DNA
atagaccacttgagcccagc

SEQ ID NO: 153868 - DNA, 20 bp, synthetic construct
  source 1..20: mol_type = other DNA
gatagaccacttgagcccag

SEQ ID NO: 153869 - DNA, 20 bp, synthetic construct
  source 1..20: mol_type = other DNA
ggatagaccacttgagccca

SEQ ID NO: 153870 - DNA, 20 bp, synthetic construct
  source 1..20: mol_type = other DNA
aggatagaccacttgagccc

SEQ ID NO: 153871 - DNA, 20 bp, synthetic construct
  source 1..20: mol_type = other DNA
gaggatagaccacttgagcc

SEQ ID NO: 153872 - DNA, 20 bp, synthetic construct
  source 1..20: mol_type = other DNA
ggaggatagaccacttgagc

SEQ ID NO: 153873 - DNA, 20 bp, synthetic construct
  source 1..20: mol_type = other DNA
aggaggatagaccacttgag

SEQ ID NO: 153874 - DNA, 20 bp, synthetic construct
  source 1..20: mol_type = other DNA
gaggaggatagaccacttga

SEQ ID NO: 153875 - DNA, 20 bp, synthetic construct
  source 1..20: mol_type = other DNA
cgaggaggatagaccacttg

SEQ ID NO: 153876 - DNA, 20 bp, synthetic construct
  source 1..20: mol_type = other DNA
tcgaggaggatagaccactt

SEQ ID NO: 153877 - DNA, 20 bp, synthetic construct
  source 1..20: mol_type = other DNA
gtcgaggaggatagaccact

SEQ ID NO: 153878 - DNA, 20 bp, synthetic construct
  source 1..20: mol_type = other DNA
ggtcgaggaggatagaccac

SEQ ID NO: 153879 - DNA, 20 bp, synthetic construct
  source 1..20: mol_type = other DNA
aggtcgaggaggatagacca

SEQ ID NO: 153880 - DNA, 20 bp, synthetic construct
  source 1..20: mol_type = other DNA
gaggtcgaggaggatagacc

SEQ ID NO: 153881 - DNA, 20 bp, synthetic construct
  source 1..20: mol_type = other DNA
ggaggtcgaggaggatagac

SEQ ID NO: 153882 - DNA, 20 bp, synthetic construct
  source 1..20: mol_type = other DNA
gggaggtcgaggaggataga

SEQ ID NO: 153883 - DNA, 20 bp, synthetic construct
  source 1..20: mol_type = other DNA
tgggaggtcgaggaggatag

SEQ ID NO: 153884 - DNA, 20 bp, synthetic construct
  source 1..20: mol_type = other DNA
ttgggaggtcgaggaggata

SEQ ID NO: 153885 - DNA, 20 bp, synthetic construct
  source 1..20: mol_type = other DNA
tttgggaggtcgaggaggat

SEQ ID NO: 153886 - DNA, 20 bp, synthetic construct
  source 1..20: mol_type = other DNA
ctttgggaggtcgaggagga

SEQ ID NO: 153887 - DNA, 20 bp, synthetic construct
  source 1..20: mol_type = other DNA
actttgggaggtcgaggagg

SEQ ID NO: 153888 - DNA, 20 bp, synthetic construct
  source 1..20: mol_type = other DNA
cactttgggaggtcgaggag

SEQ ID NO: 153889 - DNA, 20 bp, synthetic construct
  source 1..20: mol_type = other DNA
gcactttgggaggtcgagga

SEQ ID NO: 153890 - DNA, 20 bp, synthetic construct
  source 1..20: mol_type = other DNA
agcactttgggaggtcgagg

SEQ ID NO: 153891 - DNA, 20 bp, synthetic construct
  source 1..20: mol_type = other DNA
cagcactttgggaggtcgag

SEQ ID NO: 153892 - DNA, 20 bp, synthetic construct
  source 1..20: mol_type = other DNA
ccagcactttgggaggtcga

SEQ ID NO: 153893 - DNA, 20 bp, synthetic construct
  source 1..20: mol_type = other DNA
cccagcactttgggaggtcg

SEQ ID NO: 153894 - DNA, 20 bp, synthetic construct
  source 1..20: mol_type = other DNA
tcccagcactttgggaggtc

SEQ ID NO: 153895 - DNA, 20 bp, synthetic construct
  source 1..20: mol_type = other DNA
atcccagcactttgggaggt

SEQ ID NO: 153896 - DNA, 20 bp, synthetic construct
  source 1..20: mol_type = other DNA
aatcccagcactttgggagg

SEQ ID NO: 153897 - DNA, 20 bp, synthetic construct
  source 1..20: mol_type = other DNA
taatcccagcactttgggag

SEQ ID NO: 153898 - DNA, 20 bp, synthetic construct
  source 1..20: mol_type = other DNA
gtaatcccagcactttggga

SEQ ID NO: 153899 - DNA, 20 bp, synthetic construct
  source 1..20: mol_type = other DNA
tgtaatcccagcactttggg

SEQ ID NO: 153900 - DNA, 20 bp, synthetic construct
  source 1..20: mol_type = other DNA
atgtaatcccagcactttgg

SEQ ID NO: 153901 - DNA, 20 bp, synthetic construct
  source 1..20: mol_type = other DNA
catgtaatcccagcactttg

SEQ ID NO: 153902 - DNA, 20 bp, synthetic construct
  source 1..20: mol_type = other DNA
acatgtaatcccagcacttt

SEQ ID NO: 153903 - DNA, 20 bp, synthetic construct
  source 1..20: mol_type = other DNA
cacatgtaatcccagcactt

SEQ ID NO: 153904 - DNA, 20 bp, synthetic construct
  source 1..20: mol_type = other DNA
acacatgtaatcccagcact

SEQ ID NO: 153905 - DNA, 20 bp, synthetic construct
  source 1..20: mol_type = other DNA
cacacatgtaatcccagcac

SEQ ID NO: 153906 - DNA, 20 bp, synthetic construct
  source 1..20: mol_type = other DNA
tcacacatgtaatcccagca

SEQ ID NO: 153907 - DNA, 20 bp, synthetic construct
  source 1..20: mol_type = other DNA
ctcacacatgtaatcccagc

SEQ ID NO: 153908 - DNA, 20 bp, synthetic construct
  source 1..20: mol_type = other DNA
gctcacacatgtaatcccag

SEQ ID NO: 153909 - DNA, 20 bp, synthetic construct
  source 1..20: mol_type = other DNA
ggctcacacatgtaatccca

SEQ ID NO: 153910 - DNA, 20 bp, synthetic construct
  source 1..20: mol_type = other DNA
tggctcacacatgtaatccc

SEQ ID NO: 153911 - DNA, 20 bp, synthetic construct
  source 1..20: mol_type = other DNA
gtggctcacacatgtaatcc

SEQ ID NO: 153912 - DNA, 20 bp, synthetic construct
  source 1..20: mol_type = other DNA
agtggctcacacatgtaatc

SEQ ID NO: 153913 - DNA, 20 bp, synthetic construct
  source 1..20: mol_type = other DNA
cagtggctcacacatgtaat

SEQ ID NO: 153914 - DNA, 20 bp, synthetic construct
  source 1..20: mol_type = other DNA
acagtggctcacacatgtaa

SEQ ID NO: 153915 - DNA, 20 bp, synthetic construct
  source 1..20: mol_type = other DNA
cacagtggctcacacatgta

SEQ ID NO: 153916 - DNA, 20 bp, synthetic construct
  source 1..20: mol_type = other DNA
gcacagtggctcacacatgt

SEQ ID NO: 153917 - DNA, 20 bp, synthetic construct
  source 1..20: mol_type = other DNA
ggcacagtggctcacacatg

SEQ ID NO: 153918 - DNA, 20 bp, synthetic construct
  source 1..20: mol_type = other DNA
aggcacagtggctcacacat

SEQ ID NO: 153919 - DNA, 20 bp, synthetic construct
  source 1..20: mol_type = other DNA
caggcacagtggctcacaca

SEQ ID NO: 153920 - DNA, 20 bp, synthetic construct
  source 1..20: mol_type = other DNA
ccaggcacagtggctcacac

SEQ ID NO: 153921 - DNA, 20 bp, synthetic construct
  source 1..20: mol_type = other DNA
cccaggcacagtggctcaca

SEQ ID NO: 153922 - DNA, 20 bp, synthetic construct
  source 1..20: mol_type = other DNA
tcccaggcacagtggctcac

SEQ ID NO: 153923 - DNA, 20 bp, synthetic construct
  source 1..20: mol_type = other DNA
ttcccaggcacagtggctca

SEQ ID NO: 153924 - DNA, 20 bp, synthetic construct
  source 1..20: mol_type = other DNA
tttcccaggcacagtggctc

SEQ ID NO: 153925 - DNA, 20 bp, synthetic construct
  source 1..20: mol_type = other DNA
ttttcccaggcacagtggct

SEQ ID NO: 153926 - DNA, 20 bp, synthetic construct
  source 1..20: mol_type = other DNA
gttttcccaggcacagtggc

SEQ ID NO: 153927 - DNA, 20 bp, synthetic construct
  source 1..20: mol_type = other DNA
ggttttcccaggcacagtgg

SEQ ID NO: 153928 - DNA, 20 bp, synthetic construct
  source 1..20: mol_type = other DNA
gggttttcccaggcacagtg

SEQ ID NO: 153929 - DNA, 20 bp, synthetic construct
  source 1..20: mol_type = other DNA
agggttttcccaggcacagt

SEQ ID NO: 153930 - DNA, 20 bp, synthetic construct
  source 1..20: mol_type = other DNA
gagggttttcccaggcacag

SEQ ID NO: 153931 - DNA, 20 bp, synthetic construct
  source 1..20: mol_type = other DNA
tgagggttttcccaggcaca

SEQ ID NO: 153932 - DNA, 20 bp, synthetic construct
  source 1..20: mol_type = other DNA
ttgagggttttcccaggcac

SEQ ID NO: 153933 - DNA, 20 bp, synthetic construct
  source 1..20: mol_type = other DNA
gttgagggttttcccaggca

SEQ ID NO: 153934 - DNA, 20 bp, synthetic construct
  source 1..20: mol_type = other DNA
agttgagggttttcccaggc

SEQ ID NO: 153935 - DNA, 20 bp, synthetic construct
  source 1..20: mol_type = other DNA
aagttgagggttttcccagg

SEQ ID NO: 153936 - DNA, 20 bp, synthetic construct
  source 1..20: mol_type = other DNA
aaagttgagggttttcccag

SEQ ID NO: 153937 - DNA, 20 bp, synthetic construct
  source 1..20: mol_type = other DNA
aaaagttgagggttttccca

SEQ ID NO: 153938 - DNA, 20 bp, synthetic construct
  source 1..20: mol_type = other DNA
gaaaagttgagggttttccc

SEQ ID NO: 153939 - DNA, 20 bp, synthetic construct
  source 1..20: mol_type = other DNA
agaaaagttgagggttttcc

SEQ ID NO: 153940 - DNA, 20 bp, synthetic construct
  source 1..20: mol_type = other DNA
aagaaaagttgagggttttc

SEQ ID NO: 153941 - DNA, 20 bp, synthetic construct
  source 1..20: mol_type = other DNA
aaagaaaagttgagggtttt

SEQ ID NO: 153942 - DNA, 20 bp, synthetic construct
  source 1..20: mol_type = other DNA
aaaagaaaagttgagggttt

SEQ ID NO: 153943 - DNA, 20 bp, synthetic construct
  source 1..20: mol_type = other DNA
taaaagaaaagttgagggtt

SEQ ID NO: 153944 - DNA, 20 bp, synthetic construct
  source 1..20: mol_type = other DNA
ttaaaagaaaagttgagggt

SEQ ID NO: 153945 - DNA, 20 bp, synthetic construct
  source 1..20: mol_type = other DNA
tttaaaagaaaagttgaggg

SEQ ID NO: 153946 - DNA, 20 bp, synthetic construct
  source 1..20: mol_type = other DNA
ttttaaaagaaaagttgagg

SEQ ID NO: 153947 - DNA, 20 bp, synthetic construct
  source 1..20: mol_type = other DNA
tttttaaaagaaaagttgag

SEQ ID NO: 153948 - DNA, 20 bp, synthetic construct
  source 1..20: mol_type = other DNA
ttttttaaaagaaaagttga

SEQ ID NO: 153949 - DNA, 20 bp, synthetic construct
  source 1..20: mol_type = other DNA
cttttttaaaagaaaagttg

SEQ ID NO: 153950 - DNA, 20 bp, synthetic construct
  source 1..20: mol_type = other DNA
tcttttttaaaagaaaagtt

SEQ ID NO: 153951 - DNA, 20 bp, synthetic construct
  source 1..20: mol_type = other DNA
ctcttttttaaaagaaaagt

SEQ ID NO: 153952 - DNA, 20 bp, synthetic construct
  source 1..20: mol_type = other DNA
cctcttttttaaaagaaaag

SEQ ID NO: 153953 - DNA, 20 bp, synthetic construct
  source 1..20: mol_type = other DNA
acctcttttttaaaagaaaa

SEQ ID NO: 153954 - DNA, 20 bp, synthetic construct
  source 1..20: mol_type = other DNA
gacctcttttttaaaagaaa

SEQ ID NO: 153955 - DNA, 20 bp, synthetic construct
  source 1..20: mol_type = other DNA
tgacctcttttttaaaagaa

SEQ ID NO: 153956 - DNA, 20 bp, synthetic construct
  source 1..20: mol_type = other DNA
ttgacctcttttttaaaaga

SEQ ID NO: 153957 - DNA, 20 bp, synthetic construct
  source 1..20: mol_type = other DNA
gttgacctcttttttaaaag

SEQ ID NO: 153958 - DNA, 20 bp, synthetic construct
  source 1..20: mol_type = other DNA
agttgacctcttttttaaaa

SEQ ID NO: 153959 - DNA, 20 bp, synthetic construct
  source 1..20: mol_type = other DNA
aagttgacctcttttttaaa

SEQ ID NO: 153960 - DNA, 20 bp, synthetic construct
  source 1..20: mol_type = other DNA
aaagttgacctcttttttaa

SEQ ID NO: 153961 - DNA, 20 bp, synthetic construct
  source 1..20: mol_type = other DNA
taaagttgacctctttttta

SEQ ID NO: 153962 - DNA, 20 bp, synthetic construct
  source 1..20: mol_type = other DNA
ataaagttgacctctttttt

SEQ ID NO: 153963 - DNA, 20 bp, synthetic construct
  source 1..20: mol_type = other DNA
aataaagttgacctcttttt

SEQ ID NO: 153964 - DNA, 20 bp, synthetic construct
  source 1..20: mol_type = other DNA
caataaagttgacctctttt

SEQ ID NO: 153965 - DNA, 20 bp, synthetic construct
  source 1..20: mol_type = other DNA
acaataaagttgacctcttt

SEQ ID NO: 153966 - DNA, 20 bp, synthetic construct
  source 1..20: mol_type = other DNA
tacaataaagttgacctctt

SEQ ID NO: 153967 - DNA, 20 bp, synthetic construct
  source 1..20: mol_type = other DNA
atacaataaagttgacctct

SEQ ID NO: 153968 - DNA, 20 bp, synthetic construct
  source 1..20: mol_type = other DNA
tatacaataaagttgacctc

SEQ ID NO: 153969 - DNA, 20 bp, synthetic construct
  source 1..20: mol_type = other DNA
atatacaataaagttgacct

SEQ ID NO: 153970 - DNA, 20 bp, synthetic construct
  source 1..20: mol_type = other DNA
tatatacaataaagttgacc

SEQ ID NO: 153971 - DNA, 20 bp, synthetic construct
  source 1..20: mol_type = other DNA
ttatatacaataaagttgac

SEQ ID NO: 153972 - DNA, 20 bp, synthetic construct
  source 1..20: mol_type = other DNA
cttatatacaataaagttga

SEQ ID NO: 153973 - DNA, 20 bp, synthetic construct
  source 1..20: mol_type = other DNA
gcttatatacaataaagttg

SEQ ID NO: 153974 - DNA, 20 bp, synthetic construct
  source 1..20: mol_type = other DNA
tgcttatatacaataaagtt

SEQ ID NO: 153975 - DNA, 20 bp, synthetic construct
  source 1..20: mol_type = other DNA
gtgcttatatacaataaagt

SEQ ID NO: 153976 - DNA, 20 bp, synthetic construct
  source 1..20: mol_type = other DNA
agtgcttatatacaataaag

SEQ ID NO: 153977 - DNA, 20 bp, synthetic construct
  source 1..20: mol_type = other DNA
cagtgcttatatacaataaa

SEQ ID NO: 153978 - DNA, 20 bp, synthetic construct
  source 1..20: mol_type = other DNA
acagtgcttatatacaataa

SEQ ID NO: 153979 - DNA, 20 bp, synthetic construct
  source 1..20: mol_type = other DNA
cacagtgcttatatacaata

SEQ ID NO: 153980 - DNA, 20 bp, synthetic construct
  source 1..20: mol_type = other DNA
gcacagtgcttatatacaat

SEQ ID NO: 153981 - DNA, 20 bp, synthetic construct
  source 1..20: mol_type = other DNA
agcacagtgcttatatacaa

SEQ ID NO: 153982 - DNA, 20 bp, synthetic construct
  source 1..20: mol_type = other DNA
tagcacagtgcttatataca

SEQ ID NO: 153983 - DNA, 20 bp, synthetic construct
  source 1..20: mol_type = other DNA
ttagcacagtgcttatatac

SEQ ID NO: 153984 - DNA, 20 bp, synthetic construct
  source 1..20: mol_type = other DNA
tttagcacagtgcttatata

SEQ ID NO: 153985 - DNA, 20 bp, synthetic construct
  source 1..20: mol_type = other DNA
ttttagcacagtgcttatat

SEQ ID NO: 153986 - DNA, 20 bp, synthetic construct
  source 1..20: mol_type = other DNA
attttagcacagtgcttata

SEQ ID NO: 153987 - DNA, 20 bp, synthetic construct
  source 1..20: mol_type = other DNA
aattttagcacagtgcttat

SEQ ID NO: 153988 - DNA, 20 bp, synthetic construct
  source 1..20: mol_type = other DNA
caattttagcacagtgctta

SEQ ID NO: 153989 - DNA, 20 bp, synthetic construct
  source 1..20: mol_type = other DNA
gcaattttagcacagtgctt

SEQ ID NO: 153990 - DNA, 20 bp, synthetic construct
  source 1..20: mol_type = other DNA
tgcaattttagcacagtgct

SEQ ID NO: 153991 - DNA, 20 bp, synthetic construct
  source 1..20: mol_type = other DNA
ctgcaattttagcacagtgc

SEQ ID NO: 153992 - DNA, 20 bp, synthetic construct
  source 1..20: mol_type = other DNA
cctgcaattttagcacagtg

SEQ ID NO: 153993 - DNA, 20 bp, synthetic construct
  source 1..20: mol_type = other DNA
tcctgcaattttagcacagt

SEQ ID NO: 153994 - DNA, 20 bp, synthetic construct
  source 1..20: mol_type = other DNA
ttcctgcaattttagcacag

SEQ ID NO: 153995 - DNA, 20 bp, synthetic construct
  source 1..20: mol_type = other DNA
gttcctgcaattttagcaca

SEQ ID NO: 153996 - DNA, 20 bp, synthetic construct
  source 1..20: mol_type = other DNA
agttcctgcaattttagcac

SEQ ID NO: 153997 - DNA, 20 bp, synthetic construct
  source 1..20: mol_type = other DNA
cagttcctgcaattttagca

SEQ ID NO: 153998 - DNA, 20 bp, synthetic construct
  source 1..20: mol_type = other DNA
ccagttcctgcaattttagc

SEQ ID NO: 153999 - DNA, 20 bp, synthetic construct
  source 1..20: mol_type = other DNA
cccagttcctgcaattttag

SEQ ID NO: 154000 - DNA, 20 bp, synthetic construct
  source 1..20: mol_type = other DNA
tcccagttcctgcaatttta

SEQ ID NO: 154001 - DNA, 20 bp, synthetic construct
  source 1..20: mol_type = other DNA
gtcccagttcctgcaatttt

SEQ ID NO: 154002 - DNA, 20 bp, synthetic construct
  source 1..20: mol_type = other DNA
ggtcccagttcctgcaattt

SEQ ID NO: 154003 - DNA, 20 bp, synthetic construct
  source 1..20: mol_type = other DNA
tggtcccagttcctgcaatt

SEQ ID NO: 154004 - DNA, 20 bp, synthetic construct
  source 1..20: mol_type = other DNA
atggtcccagttcctgcaat

SEQ ID NO: 154005 - DNA, 20 bp, synthetic construct
  source 1..20: mol_type = other DNA
tatggtcccagttcctgcaa

SEQ ID NO: 154006 - DNA, 20 bp, synthetic construct
  source 1..20: mol_type = other DNA
atatggtcccagttcctgca

SEQ ID NO: 154007 - DNA, 20 bp, synthetic construct
  source 1..20: mol_type = other DNA
gatatggtcccagttcctgc

SEQ ID NO: 154008 - DNA, 20 bp, synthetic construct
  source 1..20: mol_type = other DNA
ggatatggtcccagttcctg

SEQ ID NO: 154009 - DNA, 20 bp, synthetic construct
  source 1..20: mol_type = other DNA
aggatatggtcccagttcct

SEQ ID NO: 154010 - DNA, 20 bp, synthetic construct
  source 1..20: mol_type = other DNA
caggatatggtcccagttcc

SEQ ID NO: 154011 - DNA, 20 bp, synthetic construct
  source 1..20: mol_type = other DNA
tcaggatatggtcccagttc

SEQ ID NO: 154012 - DNA, 20 bp, synthetic construct
  source 1..20: mol_type = other DNA
atcaggatatggtcccagtt

SEQ ID NO: 154013 - DNA, 20 bp, synthetic construct
  source 1..20: mol_type = other DNA
aatcaggatatggtcccagt

SEQ ID NO: 154014 - DNA, 20 bp, synthetic construct
  source 1..20: mol_type = other DNA
aaatcaggatatggtcccag

SEQ ID NO: 154015 - DNA, 20 bp, synthetic construct
  source 1..20: mol_type = other DNA
aaaatcaggatatggtccca

SEQ ID NO: 154016 - DNA, 20 bp, synthetic construct
  source 1..20: mol_type = other DNA
aaaaatcaggatatggtccc

SEQ ID NO: 154017 - DNA, 20 bp, synthetic construct
  source 1..20: mol_type = other DNA
caaaaatcaggatatggtcc

SEQ ID NO: 154018 - DNA, 20 bp, synthetic construct
  source 1..20: mol_type = other DNA
acaaaaatcaggatatggtc

SEQ ID NO: 154019 - DNA, 20 bp, synthetic construct
  source 1..20: mol_type = other DNA
tacaaaaatcaggatatggt

SEQ ID NO: 154020 - DNA, 20 bp, synthetic construct
  source 1..20: mol_type = other DNA
ttacaaaaatcaggatatgg

SEQ ID NO: 154021 - DNA, 20 bp, synthetic construct
  source 1..20: mol_type = other DNA
attacaaaaatcaggatatg

SEQ ID NO: 154022 - DNA, 20 bp, synthetic construct
  source 1..20: mol_type = other DNA
tattacaaaaatcaggatat

SEQ ID NO: 154023 - DNA, 20 bp, synthetic construct
  source 1..20: mol_type = other DNA
ttattacaaaaatcaggata

SEQ ID NO: 154024 - DNA, 20 bp, synthetic construct
  source 1..20: mol_type = other DNA
attattacaaaaatcaggat

SEQ ID NO: 154025 - DNA, 20 bp, synthetic construct
  source 1..20: mol_type = other DNA
cattattacaaaaatcagga

SEQ ID NO: 154026 - DNA, 20 bp, synthetic construct
  source 1..20: mol_type = other DNA
gcattattacaaaaatcagg

SEQ ID NO: 154027 - DNA, 20 bp, synthetic construct
  source 1..20: mol_type = other DNA
ggcattattacaaaaatcag

SEQ ID NO: 154028 - DNA, 20 bp, synthetic construct
  source 1..20: mol_type = other DNA
tggcattattacaaaaatca

SEQ ID NO: 154029 - DNA, 20 bp, synthetic construct
  source 1..20: mol_type = other DNA
ctggcattattacaaaaatc

SEQ ID NO: 154030 - DNA, 20 bp, synthetic construct
  source 1..20: mol_type = other DNA
gctggcattattacaaaaat

SEQ ID NO: 154031 - DNA, 20 bp, synthetic construct
  source 1..20: mol_type = other DNA
tgctggcattattacaaaaa

SEQ ID NO: 154032 - DNA, 20 bp, synthetic construct
  source 1..20: mol_type = other DNA
ctgctggcattattacaaaa

SEQ ID NO: 154033 - DNA, 20 bp, synthetic construct
  source 1..20: mol_type = other DNA
tctgctggcattattacaaa

SEQ ID NO: 154034 - DNA, 20 bp, synthetic construct
  source 1..20: mol_type = other DNA
ctctgctggcattattacaa

SEQ ID NO: 154035 - DNA, 20 bp, synthetic construct
  source 1..20: mol_type = other DNA
actctgctggcattattaca

SEQ ID NO: 154036 - DNA, 20 bp, synthetic construct
  source 1..20: mol_type = other DNA
tactctgctggcattattac

SEQ ID NO: 154037 - DNA, 20 bp, synthetic construct
  source 1..20: mol_type = other DNA
gtactctgctggcattatta

SEQ ID NO: 154038 - DNA, 20 bp, synthetic construct
  source 1..20: mol_type = other DNA
tgtactctgctggcattatt

SEQ ID NO: 154039 - DNA, 20 bp, synthetic construct
  source 1..20: mol_type = other DNA
gtgtactctgctggcattat

SEQ ID NO: 154040 - DNA, 20 bp, synthetic construct
  source 1..20: mol_type = other DNA
tgtgtactctgctggcatta

SEQ ID NO: 154041 - DNA, 20 bp, synthetic construct
  source 1..20: mol_type = other DNA
gtgtgtactctgctggcatt

SEQ ID NO: 154042 - DNA, 20 bp, synthetic construct
  source 1..20: mol_type = other DNA
tgtgtgtactctgctggcat

SEQ ID NO: 154043 - DNA, 20 bp, synthetic construct
  source 1..20: mol_type = other DNA
ttgtgtgtactctgctggca

SEQ ID NO: 154044 - DNA, 20 bp, synthetic construct
  source 1..20: mol_type = other DNA
cttgtgtgtactctgctggc

SEQ ID NO: 154045 - DNA, 20 bp, synthetic construct
  source 1..20: mol_type = other DNA
tcttgtgtgtactctgctgg

SEQ ID NO: 154046 - DNA, 20 bp, synthetic construct
  source 1..20: mol_type = other DNA
ttcttgtgtgtactctgctg

SEQ ID NO: 154047 - DNA, 20 bp, synthetic construct
  source 1..20: mol_type = other DNA
tttcttgtgtgtactctgct

SEQ ID NO: 154048 - DNA, 20 bp, synthetic construct
  source 1..20: mol_type = other DNA
ttttcttgtgtgtactctgc

SEQ ID NO: 154049 - DNA, 20 bp, synthetic construct
  source 1..20: mol_type = other DNA
cttttcttgtgtgtactctg

SEQ ID NO: 154050 - DNA, 20 bp, synthetic construct
  source 1..20: mol_type = other DNA
acttttcttgtgtgtactct

SEQ ID NO: 154051 - DNA, 20 bp, synthetic construct
  source 1..20: mol_type = other DNA
tacttttcttgtgtgtactc

SEQ ID NO: 154052 - DNA, 20 bp, synthetic construct
  source 1..20: mol_type = other DNA
ttacttttcttgtgtgtact

SEQ ID NO: 154053 - DNA, 20 bp, synthetic construct
  source 1..20: mol_type = other DNA
gttacttttcttgtgtgtac

SEQ ID NO: 154054 - DNA, 20 bp, synthetic construct
  source 1..20: mol_type = other DNA
agttacttttcttgtgtgta

SEQ ID NO: 154055 - DNA, 20 bp, synthetic construct
  source 1..20: mol_type = other DNA
cagttacttttcttgtgtgt

SEQ ID NO: 154056 - DNA, 20 bp, synthetic construct
  source 1..20: mol_type = other DNA
gcagttacttttcttgtgtg

SEQ ID NO: 154057 - DNA, 20 bp, synthetic construct
  source 1..20: mol_type = other DNA
tgcagttacttttcttgtgt

SEQ ID NO: 154058 - DNA, 20 bp, synthetic construct
  source 1..20: mol_type = other DNA
gtgcagttacttttcttgtg

SEQ ID NO: 154059 - DNA, 20 bp, synthetic construct
  source 1..20: mol_type = other DNA
agtgcagttacttttcttgt

SEQ ID NO: 154060 - DNA, 20 bp, synthetic construct
  source 1..20: mol_type = other DNA
tagtgcagttacttttcttg

SEQ ID NO: 154061 - DNA, 20 bp, synthetic construct
  source 1..20: mol_type = other DNA
ctagtgcagttacttttctt

SEQ ID NO: 154062 - DNA, 20 bp, synthetic construct
  source 1..20: mol_type = other DNA
tctagtgcagttacttttct

SEQ ID NO: 154063 - DNA, 20 bp, synthetic construct
  source 1..20: mol_type = other DNA
atctagtgcagttacttttc

SEQ ID NO: 154064 - DNA, 20 bp, synthetic construct
  source 1..20: mol_type = other DNA
aatctagtgcagttactttt

SEQ ID NO: 154065 - DNA, 20 bp, synthetic construct
  source 1..20: mol_type = other DNA
caatctagtgcagttacttt

SEQ ID NO: 154066 - DNA, 20 bp, synthetic construct
  source 1..20: mol_type = other DNA
acaatctagtgcagttactt

SEQ ID NO: 154067 - DNA, 20 bp, synthetic construct
  source 1..20: mol_type = other DNA
cacaatctagtgcagttact

SEQ ID NO: 154068 - DNA, 20 bp, synthetic construct
  source 1..20: mol_type = other DNA
tcacaatctagtgcagttac

SEQ ID NO: 154069 - DNA, 20 bp, synthetic construct
  source 1..20: mol_type = other DNA
ttcacaatctagtgcagtta

SEQ ID NO: 154070 - DNA, 20 bp, synthetic construct
  source 1..20: mol_type = other DNA
cttcacaatctagtgcagtt

SEQ ID NO: 154071 - DNA, 20 bp, synthetic construct
  source 1..20: mol_type = other DNA
tcttcacaatctagtgcagt

SEQ ID NO: 154072 - DNA, 20 bp, synthetic construct
  source 1..20: mol_type = other DNA
gtcttcacaatctagtgcag

SEQ ID NO: 154073 - DNA, 20 bp, synthetic construct
  source 1..20: mol_type = other DNA
agtcttcacaatctagtgca

SEQ ID NO: 154074 - DNA, 20 bp, synthetic construct
  source 1..20: mol_type = other DNA
cagtcttcacaatctagtgc

SEQ ID NO: 154075 - DNA, 20 bp, synthetic construct
  source 1..20: mol_type = other DNA
ccagtcttcacaatctagtg

SEQ ID NO: 154076 - DNA, 20 bp, synthetic construct
  source 1..20: mol_type = other DNA
cccagtcttcacaatctagt

SEQ ID NO: 154077 - DNA, 20 bp, synthetic construct
  source 1..20: mol_type = other DNA
ccccagtcttcacaatctag

SEQ ID NO: 154078 - DNA, 20 bp, synthetic construct
  source 1..20: mol_type = other DNA
accccagtcttcacaatcta

SEQ ID NO: 154079 - DNA, 20 bp, synthetic construct
  source 1..20: mol_type = other DNA
caccccagtcttcacaatct

SEQ ID NO: 154080 - DNA, 20 bp, synthetic construct
  source 1..20: mol_type = other DNA
ccaccccagtcttcacaatc

SEQ ID NO: 154081 - DNA, 20 bp, synthetic construct
  source 1..20: mol_type = other DNA
tccaccccagtcttcacaat

SEQ ID NO: 154082 - DNA, 20 bp, synthetic construct
  source 1..20: mol_type = other DNA
gtccaccccagtcttcacaa

SEQ ID NO: 154083 - DNA, 20 bp, synthetic construct
  source 1..20: mol_type = other DNA
ggtccaccccagtcttcaca

SEQ ID NO: 154084 - DNA, 20 bp, synthetic construct
  source 1..20: mol_type = other DNA
aggtccaccccagtcttcac

SEQ ID NO: 154085 - DNA, 20 bp, synthetic construct
  source 1..20: mol_type = other DNA
caggtccaccccagtcttca

SEQ ID NO: 154086 - DNA, 20 bp, synthetic construct
  source 1..20: mol_type = other DNA
gcaggtccaccccagtcttc

SEQ ID NO: 154087 - DNA, 20 bp, synthetic construct
  source 1..20: mol_type = other DNA
agcaggtccaccccagtctt

SEQ ID NO: 154088 - DNA, 20 bp, synthetic construct
  source 1..20: mol_type = other DNA
aagcaggtccaccccagtct

SEQ ID NO: 154089 - DNA, 20 bp, synthetic construct
  source 1..20: mol_type = other DNA
gaagcaggtccaccccagtc

SEQ ID NO: 154090 - DNA, 20 bp, synthetic construct
  source 1..20: mol_type = other DNA
agaagcaggtccaccccagt

SEQ ID NO: 154091 - DNA, 20 bp, synthetic construct
  source 1..20: mol_type = other DNA
cagaagcaggtccaccccag

SEQ ID NO: 154092 - DNA, 20 bp, synthetic construct
  source 1..20: mol_type = other DNA
tcagaagcaggtccacccca

SEQ ID NO: 154093 - DNA, 20 bp, synthetic construct
  source 1..20: mol_type = other DNA
ttcagaagcaggtccacccc

SEQ ID NO: 154094 - DNA, 20 bp, synthetic construct
  source 1..20: mol_type = other DNA
cttcagaagcaggtccaccc

SEQ ID NO: 154095 - DNA, 20 bp, synthetic construct
  source 1..20: mol_type = other DNA
ccttcagaagcaggtccacc

SEQ ID NO: 154096 - DNA, 20 bp, synthetic construct
  source 1..20: mol_type = other DNA
accttcagaagcaggtccac

SEQ ID NO: 154097 - DNA, 20 bp, synthetic construct
  source 1..20: mol_type = other DNA
gaccttcagaagcaggtcca

SEQ ID NO: 154098 - DNA, 20 bp, synthetic construct
  source 1..20: mol_type = other DNA
ggaccttcagaagcaggtcc

SEQ ID NO: 154099 - DNA, 20 bp, synthetic construct
  source 1..20: mol_type = other DNA
tggaccttcagaagcaggtc

SEQ ID NO: 154100 - DNA, 20 bp, synthetic construct
  source 1..20: mol_type = other DNA
ctggaccttcagaagcaggt

SEQ ID NO: 154101 - DNA, 20 bp, synthetic construct
  source 1..20: mol_type = other DNA
actggaccttcagaagcagg

SEQ ID NO: 154102 - DNA, 20 bp, synthetic construct
  source 1..20: mol_type = other DNA
cactggaccttcagaagcag

SEQ ID NO: 154103 - DNA, 20 bp, synthetic construct
  source 1..20: mol_type = other DNA
gcactggaccttcagaagca

SEQ ID NO: 154104 - DNA, 20 bp, synthetic construct
  source 1..20: mol_type = other DNA
ggcactggaccttcagaagc

SEQ ID NO: 154105 - DNA, 20 bp, synthetic construct
  source 1..20: mol_type = other DNA
gggcactggaccttcagaag

SEQ ID NO: 154106 - DNA, 20 bp, synthetic construct
  source 1..20: mol_type = other DNA
agggcactggaccttcagaa

SEQ ID NO: 154107 - DNA, 20 bp, synthetic construct
  source 1..20: mol_type = other DNA
aagggcactggaccttcaga

SEQ ID NO: 154108 - DNA, 20 bp, synthetic construct
  source 1..20: mol_type = other DNA
aaagggcactggaccttcag

SEQ ID NO: 154109 - DNA, 20 bp, synthetic construct
  source 1..20: mol_type = other DNA
caaagggcactggaccttca

SEQ ID NO: 154110 - DNA, 20 bp, synthetic construct
  source 1..20: mol_type = other DNA
acaaagggcactggaccttc

SEQ ID NO: 154111 - DNA, 20 bp, synthetic construct
  source 1..20: mol_type = other DNA
gacaaagggcactggacctt

SEQ ID NO: 154112 - DNA, 20 bp, synthetic construct
  source 1..20: mol_type = other DNA
agacaaagggcactggacct

SEQ ID NO: 154113 - DNA, 20 bp, synthetic construct
  source 1..20: mol_type = other DNA
aagacaaagggcactggacc

SEQ ID NO: 154114 - DNA, 20 bp, synthetic construct
  source 1..20: mol_type = other DNA
taagacaaagggcactggac

SEQ ID NO: 154115 - DNA, 20 bp, synthetic construct
  source 1..20: mol_type = other DNA
ttaagacaaagggcactgga

SEQ ID NO: 154116 - DNA, 20 bp, synthetic construct
  source 1..20: mol_type = other DNA
cttaagacaaagggcactgg

SEQ ID NO: 154117 - DNA, 20 bp, synthetic construct
  source 1..20: mol_type = other DNA
tcttaagacaaagggcactg

SEQ ID NO: 154118 - DNA, 20 bp, synthetic construct
  source 1..20: mol_type = other DNA
atcttaagacaaagggcact

SEQ ID NO: 154119 - DNA, 20 bp, synthetic construct
  source 1..20: mol_type = other DNA
aatcttaagacaaagggcac

SEQ ID NO: 154120 - DNA, 20 bp, synthetic construct
  source 1..20: mol_type = other DNA
aaatcttaagacaaagggca

SEQ ID NO: 154121 - DNA, 20 bp, synthetic construct
  source 1..20: mol_type = other DNA
caaatcttaagacaaagggc

SEQ ID NO: 154122 - DNA, 20 bp, synthetic construct
  source 1..20: mol_type = other DNA
ccaaatcttaagacaaaggg

SEQ ID NO: 154123 - DNA, 20 bp, synthetic construct
  source 1..20: mol_type = other DNA
accaaatcttaagacaaagg

SEQ ID NO: 154124 - DNA, 20 bp, synthetic construct
  source 1..20: mol_type = other DNA
caccaaatcttaagacaaag

SEQ ID NO: 154125 - DNA, 20 bp, synthetic construct
  source 1..20: mol_type = other DNA
acaccaaatcttaagacaaa

SEQ ID NO: 154126 - DNA, 20 bp, synthetic construct
  source 1..20: mol_type = other DNA
tacaccaaatcttaagacaa

SEQ ID NO: 154127 - DNA, 20 bp, synthetic construct
  source 1..20: mol_type = other DNA
ctacaccaaatcttaagaca

SEQ ID NO: 154128 - DNA, 20 bp, synthetic construct
  source 1..20: mol_type = other DNA
actacaccaaatcttaagac

SEQ ID NO: 154129 - DNA, 20 bp, synthetic construct
  source 1..20: mol_type = other DNA
cactacaccaaatcttaaga

SEQ ID NO: 154130 - DNA, 20 bp, synthetic construct
  source 1..20: mol_type = other DNA
acactacaccaaatcttaag

SEQ ID NO: 154131 - DNA, 20 bp, synthetic construct
  source 1..20: mol_type = other DNA
cacactacaccaaatcttaa

SEQ ID NO: 154132 - DNA, 20 bp, synthetic construct
  source 1..20: mol_type = other DNA
acacactacaccaaatctta

SEQ ID NO: 154133 - DNA, 20 bp, synthetic construct
  source 1..20: mol_type = other DNA
gacacactacaccaaatctt

SEQ ID NO: 154134 - DNA, 20 bp, synthetic construct
  source 1..20: mol_type = other DNA
agacacactacaccaaatct

SEQ ID NO: 154135 - DNA, 20 bp, synthetic construct
  source 1..20: mol_type = other DNA
aagacacactacaccaaatc

SEQ ID NO: 154136 - DNA, 20 bp, synthetic construct
  source 1..20: mol_type = other DNA
aaagacacactacaccaaat

SEQ ID NO: 154137 - DNA, 20 bp, synthetic construct
  source 1..20: mol_type = other DNA
taaagacacactacaccaaa

SEQ ID NO: 154138 - DNA, 20 bp, synthetic construct
  source 1..20: mol_type = other DNA
ctaaagacacactacaccaa

SEQ ID NO: 154139 - DNA, 20 bp, synthetic construct
  source 1..20: mol_type = other DNA
tctaaagacacactacacca

SEQ ID NO: 154140 - DNA, 20 bp, synthetic construct
  source 1..20: mol_type = other DNA
ttctaaagacacactacacc

SEQ ID NO: 154141 - DNA, 20 bp, synthetic construct
  source 1..20: mol_type = other DNA
tttctaaagacacactacac

SEQ ID NO: 154142 - DNA, 20 bp, synthetic construct
  source 1..20: mol_type = other DNA
gtttctaaagacacactaca

SEQ ID NO: 154143 - DNA, 20 bp, synthetic construct
  source 1..20: mol_type = other DNA
ggtttctaaagacacactac

SEQ ID NO: 154144 - DNA, 20 bp, synthetic construct
  source 1..20: mol_type = other DNA
tggtttctaaagacacacta

SEQ ID NO: 154145 - DNA, 20 bp, synthetic construct
  source 1..20: mol_type = other DNA
ttggtttctaaagacacact

SEQ ID NO: 154146 - DNA, 20 bp, synthetic construct
  source 1..20: mol_type = other DNA
tttggtttctaaagacacac

SEQ ID NO: 154147 - DNA, 20 bp, synthetic construct
  source 1..20: mol_type = other DNA
ttttggtttctaaagacaca

SEQ ID NO: 154148 - DNA, 20 bp, synthetic construct
  source 1..20: mol_type = other DNA
tttttggtttctaaagacac

SEQ ID NO: 154149 - DNA, 20 bp, synthetic construct
  source 1..20: mol_type = other DNA
ttttttggtttctaaagaca

SEQ ID NO: 154150 - DNA, 20 bp, synthetic construct
  source 1..20: mol_type = other DNA
tttttttggtttctaaagac

SEQ ID NO: 154151 - DNA, 20 bp, synthetic construct
  source 1..20: mol_type = other DNA
ctttttttggtttctaaaga

SEQ ID NO: 154152 - DNA, 20 bp, synthetic construct
  source 1..20: mol_type = other DNA
tctttttttggtttctaaag

SEQ ID NO: 154153 - DNA, 20 bp, synthetic construct
  source 1..20: mol_type = other DNA
ctctttttttggtttctaaa

SEQ ID NO: 154154 - DNA, 20 bp, synthetic construct
  source 1..20: mol_type = other DNA
tctctttttttggtttctaa

SEQ ID NO: 154155 - DNA, 20 bp, synthetic construct
  source 1..20: mol_type = other DNA
ttctctttttttggtttcta

SEQ ID NO: 154156 - DNA, 20 bp, synthetic construct
  source 1..20: mol_type = other DNA
cttctctttttttggtttct

SEQ ID NO: 154157 - DNA, 20 bp, synthetic construct
  source 1..20: mol_type = other DNA
tcttctctttttttggtttc

SEQ ID NO: 154158 - DNA, 20 bp, synthetic construct
  source 1..20: mol_type = other DNA
ttcttctctttttttggttt

SEQ ID NO: 154159 - DNA, 20 bp, synthetic construct
  source 1..20: mol_type = other DNA
cttcttctctttttttggtt

SEQ ID NO: 154160 - DNA, 20 bp, synthetic construct
  source 1..20: mol_type = other DNA
tcttcttctctttttttggt

SEQ ID NO: 154161 - DNA, 20 bp, synthetic construct
  source 1..20: mol_type = other DNA
atcttcttctctttttttgg

SEQ ID NO: 154162 - DNA, 20 bp, synthetic construct
  source 1..20: mol_type = other DNA
gatcttcttctctttttttg

SEQ ID NO: 154163 - DNA, 20 bp, synthetic construct
  source 1..20: mol_type = other DNA
tgatcttcttctcttttttt

SEQ ID NO: 154164 - DNA, 20 bp, synthetic construct
  source 1..20: mol_type = other DNA
ttgatcttcttctctttttt

SEQ ID NO: 154165 - DNA, 20 bp, synthetic construct
  source 1..20: mol_type = other DNA
gttgatcttcttctcttttt

SEQ ID NO: 154166 - DNA, 20 bp, synthetic construct
  source 1..20: mol_type = other DNA
ggttgatcttcttctctttt

SEQ ID NO: 154167 - DNA, 20 bp, synthetic construct
  source 1..20: mol_type = other DNA
aggttgatcttcttctcttt

SEQ ID NO: 154168 - DNA, 20 bp, synthetic construct
  source 1..20: mol_type = other DNA
aaggttgatcttcttctctt

SEQ ID NO: 154169 - DNA, 20 bp, synthetic construct
  source 1..20: mol_type = other DNA
taaggttgatcttcttctct

SEQ ID NO: 154170 - DNA, 20 bp, synthetic construct
  source 1..20: mol_type = other DNA
ttaaggttgatcttcttctc

SEQ ID NO: 154171 - DNA, 20 bp, synthetic construct
  source 1..20: mol_type = other DNA
cttaaggttgatcttcttct

SEQ ID NO: 154172 - DNA, 20 bp, synthetic construct
  source 1..20: mol_type = other DNA
tcttaaggttgatcttcttc

SEQ ID NO: 154173 - DNA, 20 bp, synthetic construct
  source 1..20: mol_type = other DNA
atcttaaggttgatcttctt

SEQ ID NO: 154174 - DNA, 20 bp, synthetic construct
  source 1..20: mol_type = other DNA
aatcttaaggttgatcttct

SEQ ID NO: 154175 - DNA, 20 bp, synthetic construct
  source 1..20: mol_type = other DNA
taatcttaaggttgatcttc

SEQ ID NO: 154176 - DNA, 20 bp, synthetic construct
  source 1..20: mol_type = other DNA
ctaatcttaaggttgatctt

SEQ ID NO: 154177 - DNA, 20 bp, synthetic construct
  source 1..20: mol_type = other DNA
gctaatcttaaggttgatct

SEQ ID NO: 154178 - DNA, 20 bp, synthetic construct
  source 1..20: mol_type = other DNA
ggctaatcttaaggttgatc

SEQ ID NO: 154179 - DNA, 20 bp, synthetic construct
  source 1..20: mol_type = other DNA
tggctaatcttaaggttgat

SEQ ID NO: 154180 - DNA, 20 bp, synthetic construct
  source 1..20: mol_type = other DNA
gtggctaatcttaaggttga

SEQ ID NO: 154181 - DNA, 20 bp, synthetic construct
  source 1..20: mol_type = other DNA
tgtggctaatcttaaggttg

SEQ ID NO: 154182 - DNA, 20 bp, synthetic construct
  source 1..20: mol_type = other DNA
ttgtggctaatcttaaggtt

SEQ ID NO: 154183 - DNA, 20 bp, synthetic construct
  source 1..20: mol_type = other DNA
tttgtggctaatcttaaggt

SEQ ID NO: 154184 - DNA, 20 bp, synthetic construct
  source 1..20: mol_type = other DNA
ttttgtggctaatcttaagg

SEQ ID NO: 154185 - DNA, 20 bp, synthetic construct
  source 1..20: mol_type = other DNA
gttttgtggctaatcttaag

SEQ ID NO: 154186 - DNA, 20 bp, synthetic construct
  source 1..20: mol_type = other DNA
agttttgtggctaatcttaa

SEQ ID NO: 154187 - DNA, 20 bp, synthetic construct
  source 1..20: mol_type = other DNA
cagttttgtggctaatctta

SEQ ID NO: 154188 - DNA, 20 bp, synthetic construct
  source 1..20: mol_type = other DNA
ccagttttgtggctaatctt

SEQ ID NO: 154189 - DNA, 20 bp, synthetic construct
  source 1..20: mol_type = other DNA
cccagttttgtggctaatct

SEQ ID NO: 154190 - DNA, 20 bp, synthetic construct
  source 1..20: mol_type = other DNA
gcccagttttgtggctaatc

SEQ ID NO: 154191 - DNA, 20 bp, synthetic construct
  source 1..20: mol_type = other DNA
agcccagttttgtggctaat

SEQ ID NO: 154192 - DNA, 20 bp, synthetic construct
  source 1..20: mol_type = other DNA
aagcccagttttgtggctaa

SEQ ID NO: 154193 - DNA, 20 bp, synthetic construct
  source 1..20: mol_type = other DNA
aaagcccagttttgtggcta

SEQ ID NO: 154194 - DNA, 20 bp, synthetic construct
  source 1..20: mol_type = other DNA
caaagcccagttttgtggct

SEQ ID NO: 154195 - DNA, 20 bp, synthetic construct
  source 1..20: mol_type = other DNA
tcaaagcccagttttgtggc

SEQ ID NO: 154196 - DNA, 20 bp, synthetic construct
  source 1..20: mol_type = other DNA
atcaaagcccagttttgtgg

SEQ ID NO: 154197 - DNA, 20 bp, synthetic construct
  source 1..20: mol_type = other DNA
tatcaaagcccagttttgtg

SEQ ID NO: 154198 - DNA, 20 bp, synthetic construct
  source 1..20: mol_type = other DNA
gtatcaaagcccagttttgt

SEQ ID NO: 154199 - DNA, 20 bp, synthetic construct
  source 1..20: mol_type = other DNA
ggtatcaaagcccagttttg

SEQ ID NO: 154200 - DNA, 20 bp, synthetic construct
  source 1..20: mol_type = other DNA
aggtatcaaagcccagtttt

SEQ ID NO: 154201 - DNA, 20 bp, synthetic construct
  source 1..20: mol_type = other DNA
taggtatcaaagcccagttt

SEQ ID NO: 154202 - DNA, 20 bp, synthetic construct
  source 1..20: mol_type = other DNA
ctaggtatcaaagcccagtt

SEQ ID NO: 154203 - DNA, 20 bp, synthetic construct
  source 1..20: mol_type = other DNA
cctaggtatcaaagcccagt

SEQ ID NO: 154204 - DNA, 20 bp, synthetic construct
  source 1..20: mol_type = other DNA
acctaggtatcaaagcccag

SEQ ID NO: 154205 - DNA, 20 bp, synthetic construct
  source 1..20: mol_type = other DNA
cacctaggtatcaaagccca

SEQ ID NO: 154206 - DNA, 20 bp, synthetic construct
  source 1..20: mol_type = other DNA
acacctaggtatcaaagccc

SEQ ID NO: 154207 - DNA, 20 bp, synthetic construct
  source 1..20: mol_type = other DNA
cacacctaggtatcaaagcc

SEQ ID NO: 154208 - DNA, 20 bp, synthetic construct
  source 1..20: mol_type = other DNA
ccacacctaggtatcaaagc

SEQ ID NO: 154209 - DNA, 20 bp, synthetic construct
  source 1..20: mol_type = other DNA
tccacacctaggtatcaaag

SEQ ID NO: 154210 - DNA, 20 bp, synthetic construct
  source 1..20: mol_type = other DNA
ttccacacctaggtatcaaa

SEQ ID NO: 154211 - DNA, 20 bp, synthetic construct
  source 1..20: mol_type = other DNA
tttccacacctaggtatcaa

SEQ ID NO: 154212 - DNA, 20 bp, synthetic construct
  source 1..20: mol_type = other DNA
ttttccacacctaggtatca

SEQ ID NO: 154213 - DNA, 20 bp, synthetic construct
  source 1..20: mol_type = other DNA
cttttccacacctaggtatc

SEQ ID NO: 154214 - DNA, 20 bp, synthetic construct
  source 1..20: mol_type = other DNA
tcttttccacacctaggtat

SEQ ID NO: 154215 - DNA, 20 bp, synthetic construct
  source 1..20: mol_type = other DNA
ttcttttccacacctaggta

SEQ ID NO: 154216 - DNA, 20 bp, synthetic construct
  source 1..20: mol_type = other DNA
tttcttttccacacctaggt

SEQ ID NO: 154217 - DNA, 20 bp, synthetic construct
  source 1..20: mol_type = other DNA
ctttcttttccacacctagg

SEQ ID NO: 154218 - DNA, 20 bp, synthetic construct
  source 1..20: mol_type = other DNA
cctttcttttccacacctag

SEQ ID NO: 154219 - DNA, 20 bp, synthetic construct
  source 1..20: mol_type = other DNA
ccctttcttttccacaccta

SEQ ID NO: 154220 - DNA, 20 bp, synthetic construct
  source 1..20: mol_type = other DNA
tccctttcttttccacacct

SEQ ID NO: 154221 - DNA, 20 bp, synthetic construct
  source 1..20: mol_type = other DNA
ttccctttcttttccacacc

SEQ ID NO: 154222 - DNA, 20 bp, synthetic construct
  source 1..20: mol_type = other DNA
tttccctttcttttccacac

SEQ ID NO: 154223 - DNA, 20 bp, synthetic construct
  source 1..20: mol_type = other DNA
ctttccctttcttttccaca

SEQ ID NO: 154224 - DNA, 20 bp, synthetic construct
  source 1..20: mol_type = other DNA
tctttccctttcttttccac

SEQ ID NO: 154225 - DNA, 20 bp, synthetic construct
  source 1..20: mol_type = other DNA
ctctttccctttcttttcca

SEQ ID NO: 154226 - DNA, 20 bp, synthetic construct
  source 1..20: mol_type = other DNA
actctttccctttcttttcc

SEQ ID NO: 154227 - DNA, 20 bp, synthetic construct
  source 1..20: mol_type = other DNA
aactctttccctttcttttc

SEQ ID NO: 154228 - DNA, 20 bp, synthetic construct
  source 1..20: mol_type = other DNA
caactctttccctttctttt

SEQ ID NO: 154229 - DNA, 20 bp, synthetic construct
  source 1..20: mol_type = other DNA
tcaactctttccctttcttt

SEQ ID NO: 154230 - DNA, 20 bp, synthetic construct
  source 1..20: mol_type = other DNA
atcaactctttccctttctt

SEQ ID NO: 154231 - DNA, 20 bp, synthetic construct
  source 1..20: mol_type = other DNA
catcaactctttccctttct

SEQ ID NO: 154232 - DNA, 20 bp, synthetic construct
  source 1..20: mol_type = other DNA
acatcaactctttccctttc

SEQ ID NO: 154233 - DNA, 20 bp, synthetic construct
  source 1..20: mol_type = other DNA
aacatcaactctttcccttt

SEQ ID NO: 154234 - DNA, 20 bp, synthetic construct
  source 1..20: mol_type = other DNA
aaacatcaactctttccctt

SEQ ID NO: 154235 - DNA, 20 bp, synthetic construct
  source 1..20: mol_type = other DNA
aaaacatcaactctttccct

SEQ ID NO: 154236 - DNA, 20 bp, synthetic construct
  source 1..20: mol_type = other DNA
caaaacatcaactctttccc

SEQ ID NO: 154237 - DNA, 20 bp, synthetic construct
  source 1..20: mol_type = other DNA
acaaaacatcaactctttcc

SEQ ID NO: 154238 - DNA, 20 bp, synthetic construct
  source 1..20: mol_type = other DNA
gacaaaacatcaactctttc

SEQ ID NO: 154239 - DNA, 20 bp, synthetic construct
  source 1..20: mol_type = other DNA
agacaaaacatcaactcttt

SEQ ID NO: 154240 - DNA, 20 bp, synthetic construct
  source 1..20: mol_type = other DNA
aagacaaaacatcaactctt

SEQ ID NO: 154241 - DNA, 20 bp, synthetic construct
  source 1..20: mol_type = other DNA
taagacaaaacatcaactct

SEQ ID NO: 154242 - DNA, 20 bp, synthetic construct
  source 1..20: mol_type = other DNA
gtaagacaaaacatcaactc

SEQ ID NO: 154243 - DNA, 20 bp, synthetic construct
  source 1..20: mol_type = other DNA
tgtaagacaaaacatcaact

SEQ ID NO: 154244 - DNA, 20 bp, synthetic construct
  source 1..20: mol_type = other DNA
ctgtaagacaaaacatcaac

SEQ ID NO: 154245 - DNA, 20 bp, synthetic construct
  source 1..20: mol_type = other DNA
gctgtaagacaaaacatcaa

SEQ ID NO: 154246 - DNA, 20 bp, synthetic construct
  source 1..20: mol_type = other DNA
tgctgtaagacaaaacatca

SEQ ID NO: 154247 - DNA, 20 bp, synthetic construct
  source 1..20: mol_type = other DNA
atgctgtaagacaaaacatc

SEQ ID NO: 154248 - DNA, 20 bp, synthetic construct
  source 1..20: mol_type = other DNA
gatgctgtaagacaaaacat

SEQ ID NO: 154249 - DNA, 20 bp, synthetic construct
  source 1..20: mol_type = other DNA
tgatgctgtaagacaaaaca

SEQ ID NO: 154250 - DNA, 20 bp, synthetic construct
  source 1..20: mol_type = other DNA
atgatgctgtaagacaaaac

SEQ ID NO: 154251 - DNA, 20 bp, synthetic construct
  source 1..20: mol_type = other DNA
aatgatgctgtaagacaaaa

SEQ ID NO: 154252 - DNA, 20 bp, synthetic construct
  source 1..20: mol_type = other DNA
caatgatgctgtaagacaaa

SEQ ID NO: 154253 - DNA, 20 bp, synthetic construct
  source 1..20: mol_type = other DNA
acaatgatgctgtaagacaa

SEQ ID NO: 154254 - DNA, 20 bp, synthetic construct
  source 1..20: mol_type = other DNA
tacaatgatgctgtaagaca

SEQ ID NO: 154255 - DNA, 20 bp, synthetic construct
  source 1..20: mol_type = other DNA
ctacaatgatgctgtaagac

SEQ ID NO: 154256 - DNA, 20 bp, synthetic construct
  source 1..20: mol_type = other DNA
tctacaatgatgctgtaaga

SEQ ID NO: 154257 - DNA, 20 bp, synthetic construct
  source 1..20: mol_type = other DNA
ttctacaatgatgctgtaag

SEQ ID NO: 154258 - DNA, 20 bp, synthetic construct
  source 1..20: mol_type = other DNA
cttctacaatgatgctgtaa

SEQ ID NO: 154259 - DNA, 20 bp, synthetic construct
  source 1..20: mol_type = other DNA
tcttctacaatgatgctgta

SEQ ID NO: 154260 - DNA, 20 bp, synthetic construct
  source 1..20: mol_type = other DNA
ctcttctacaatgatgctgt

SEQ ID NO: 154261 - DNA, 20 bp, synthetic construct
  source 1..20: mol_type = other DNA
cctcttctacaatgatgctg

SEQ ID NO: 154262 - DNA, 20 bp, synthetic construct
  source 1..20: mol_type = other DNA
ccctcttctacaatgatgct

SEQ ID NO: 154263 - DNA, 20 bp, synthetic construct
  source 1..20: mol_type = other DNA
accctcttctacaatgatgc

SEQ ID NO: 154264 - DNA, 20 bp, synthetic construct
  source 1..20: mol_type = other DNA
caccctcttctacaatgatg

SEQ ID NO: 154265 - DNA, 20 bp, synthetic construct
  source 1..20: mol_type = other DNA
acaccctcttctacaatgat

SEQ ID NO: 154266 - DNA, 20 bp, synthetic construct
  source 1..20: mol_type = other DNA
aacaccctcttctacaatga

SEQ ID NO: 154267 - DNA, 20 bp, synthetic construct
  source 1..20: mol_type = other DNA
aaacaccctcttctacaatg

SEQ ID NO: 154268 - DNA, 20 bp, synthetic construct
  source 1..20: mol_type = other DNA
aaaacaccctcttctacaat

SEQ ID NO: 154269 - DNA, 20 bp, synthetic construct
  source 1..20: mol_type = other DNA
aaaaacaccctcttctacaa

SEQ ID NO: 154270 - DNA, 20 bp, synthetic construct
  source 1..20: mol_type = other DNA
aaaaaacaccctcttctaca

SEQ ID NO: 154271 - DNA, 20 bp, synthetic construct
  source 1..20: mol_type = other DNA
aaaaaaacaccctcttctac

SEQ ID NO: 154272 - DNA, 20 bp, synthetic construct
  source 1..20: mol_type = other DNA
caaaaaaacaccctcttcta

SEQ ID NO: 154273 - DNA, 20 bp, synthetic construct
  source 1..20: mol_type = other DNA
acaaaaaaacaccctcttct

SEQ ID NO: 154274 - DNA, 20 bp, synthetic construct
  source 1..20: mol_type = other DNA
aacaaaaaaacaccctcttc

SEQ ID NO: 154275 - DNA, 20 bp, synthetic construct
  source 1..20: mol_type = other DNA
aaacaaaaaaacaccctctt

SEQ ID NO: 154276 - DNA, 20 bp, synthetic construct
  source 1..20: mol_type = other DNA
caaacaaaaaaacaccctct

SEQ ID NO: 154277 - DNA, 20 bp, synthetic construct
  source 1..20: mol_type = other DNA
acaaacaaaaaaacaccctc

SEQ ID NO: 154278 - DNA, 20 bp, synthetic construct
  source 1..20: mol_type = other DNA
aacaaacaaaaaaacaccct

SEQ ID NO: 154279 - DNA, 20 bp, synthetic construct
  source 1..20: mol_type = other DNA
aaacaaacaaaaaaacaccc

SEQ ID NO: 154280 - DNA, 20 bp, synthetic construct
  source 1..20: mol_type = other DNA
caaacaaacaaaaaaacacc

SEQ ID NO: 154281 - DNA, 20 bp, synthetic construct
  source 1..20: mol_type = other DNA
acaaacaaacaaaaaaacac

SEQ ID NO: 154282 - DNA, 20 bp, synthetic construct
  source 1..20: mol_type = other DNA
aacaaacaaacaaaaaaaca

SEQ ID NO: 154283 - DNA, 20 bp, synthetic construct
  source 1..20: mol_type = other DNA
aaacaaacaaacaaaaaaac

SEQ ID NO: 154284 - DNA, 20 bp, synthetic construct
  source 1..20: mol_type = other DNA
aaaacaaacaaacaaaaaaa

SEQ ID NO: 154285 - DNA, 20 bp, synthetic construct
  source 1..20: mol_type = other DNA
aaaaacaaacaaacaaaaaa

SEQ ID NO: 154286 - DNA, 20 bp, synthetic construct
  source 1..20: mol_type = other DNA
aaaaaacaaacaaacaaaaa

SEQ ID NO: 154287 - DNA, 20 bp, synthetic construct
  source 1..20: mol_type = other DNA
caaaaaacaaacaaacaaaa

SEQ ID NO: 154288 - DNA, 20 bp, synthetic construct
  source 1..20: mol_type = other DNA
tcaaaaaacaaacaaacaaa

SEQ ID NO: 154289 - DNA, 20 bp, synthetic construct
  source 1..20: mol_type = other DNA
ctcaaaaaacaaacaaacaa

SEQ ID NO: 154290 - DNA, 20 bp, synthetic construct
  source 1..20: mol_type = other DNA
tctcaaaaaacaaacaaaca

SEQ ID NO: 154291 - DNA, 20 bp, synthetic construct
  source 1..20: mol_type = other DNA
gtctcaaaaaacaaacaaac

SEQ ID NO: 154292 - DNA, 20 bp, synthetic construct
  source 1..20: mol_type = other DNA
cgtctcaaaaaacaaacaaa

SEQ ID NO: 154293 - DNA, 20 bp, synthetic construct
  source 1..20: mol_type = other DNA
ccgtctcaaaaaacaaacaa

SEQ ID NO: 154294 - DNA, 20 bp, synthetic construct
  source 1..20: mol_type = other DNA
tccgtctcaaaaaacaaaca

SEQ ID NO: 154295 - DNA, 20 bp, synthetic construct
  source 1..20: mol_type = other DNA
ctccgtctcaaaaaacaaac

SEQ ID NO: 154296 - DNA, 20 bp, synthetic construct
  source 1..20: mol_type = other DNA
actccgtctcaaaaaacaaa

SEQ ID NO: 154297 - DNA, 20 bp, synthetic construct
  source 1..20: mol_type = other DNA
gactccgtctcaaaaaacaa

SEQ ID NO: 154298 - DNA, 20 bp, synthetic construct
  source 1..20: mol_type = other DNA
agactccgtctcaaaaaaca

SEQ ID NO: 154299 - DNA, 20 bp, synthetic construct
  source 1..20: mol_type = other DNA
aagactccgtctcaaaaaac

SEQ ID NO: 154300 - DNA, 20 bp, synthetic construct
  source 1..20: mol_type = other DNA
taagactccgtctcaaaaaa

SEQ ID NO: 154301 - DNA, 20 bp, synthetic construct
  source 1..20: mol_type = other DNA
gtaagactccgtctcaaaaa

SEQ ID NO: 154302 - DNA, 20 bp, synthetic construct
  source 1..20: mol_type = other DNA
agtaagactccgtctcaaaa

SEQ ID NO: 154303 - DNA, 20 bp, synthetic construct
  source 1..20: mol_type = other DNA
gagtaagactccgtctcaaa

SEQ ID NO: 154304 - DNA, 20 bp, synthetic construct
  source 1..20: mol_type = other DNA
agagtaagactccgtctcaa

SEQ ID NO: 154305 - DNA, 20 bp, synthetic construct
  source 1..20: mol_type = other DNA
cagagtaagactccgtctca

SEQ ID NO: 154306 - DNA, 20 bp, synthetic construct
  source 1..20: mol_type = other DNA
acagagtaagactccgtctc

SEQ ID NO: 154307 - DNA, 20 bp, synthetic construct
  source 1..20: mol_type = other DNA
cacagagtaagactccgtct

SEQ ID NO: 154308 - DNA, 20 bp, synthetic construct
  source 1..20: mol_type = other DNA
ccacagagtaagactccgtc

SEQ ID NO: 154309 - DNA, 20 bp, synthetic construct
  source 1..20: mol_type = other DNA
gccacagagtaagactccgt

SEQ ID NO: 154310 - DNA, 20 bp, synthetic construct
  source 1..20: mol_type = other DNA
ggccacagagtaagactccg

SEQ ID NO: 154311 - DNA, 20 bp, synthetic construct
  source 1..20: mol_type = other DNA
gggccacagagtaagactcc

SEQ ID NO: 154312 - DNA, 20 bp, synthetic construct
  source 1..20: mol_type = other DNA
tgggccacagagtaagactc

SEQ ID NO: 154313 - DNA, 20 bp, synthetic construct
  source 1..20: mol_type = other DNA
ctgggccacagagtaagact

SEQ ID NO: 154314 - DNA, 20 bp, synthetic construct
  source 1..20: mol_type = other DNA
cctgggccacagagtaagac

SEQ ID NO: 154315 - DNA, 20 bp, synthetic construct
  source 1..20: mol_type = other DNA
gcctgggccacagagtaaga

SEQ ID NO: 154316 - DNA, 20 bp, synthetic construct
  source 1..20: mol_type = other DNA
agcctgggccacagagtaag

SEQ ID NO: 154317 - DNA, 20 bp, synthetic construct
  source 1..20: mol_type = other DNA
cagcctgggccacagagtaa

SEQ ID NO: 154318 - DNA, 20 bp, synthetic construct
  source 1..20: mol_type = other DNA
ccagcctgggccacagagta

SEQ ID NO: 154319 - DNA, 20 bp, synthetic construct
  source 1..20: mol_type = other DNA
tccagcctgggccacagagt

SEQ ID NO: 154320 - DNA, 20 bp, synthetic construct
  source 1..20: mol_type = other DNA
ctccagcctgggccacagag

SEQ ID NO: 154321 - DNA, 20 bp, synthetic construct
  source 1..20: mol_type = other DNA
actccagcctgggccacaga

SEQ ID NO: 154322 - DNA, 20 bp, synthetic construct
  source 1..20: mol_type = other DNA
cactccagcctgggccacag

SEQ ID NO: 154323 - DNA, 20 bp, synthetic construct
  source 1..20: mol_type = other DNA
gcactccagcctgggccaca

SEQ ID NO: 154324 - DNA, 20 bp, synthetic construct
  source 1..20: mol_type = other DNA
tgcactccagcctgggccac

SEQ ID NO: 154325 - DNA, 20 bp, synthetic construct
  source 1..20: mol_type = other DNA
ctgcactccagcctgggcca

SEQ ID NO: 154326 - DNA, 20 bp, synthetic construct
  source 1..20: mol_type = other DNA
actgcactccagcctgggcc

SEQ ID NO: 154327 - DNA, 20 bp, synthetic construct
  source 1..20: mol_type = other DNA
cactgcactccagcctgggc

SEQ ID NO: 154328 - DNA, 20 bp, synthetic construct
  source 1..20: mol_type = other DNA
ccactgcactccagcctggg

SEQ ID NO: 154329 - DNA, 20 bp, synthetic construct
  source 1..20: mol_type = other DNA
gccactgcactccagcctgg

SEQ ID NO: 154330 - DNA, 20 bp, synthetic construct
  source 1..20: mol_type = other DNA
cgccactgcactccagcctg

SEQ ID NO: 154331 - DNA, 20 bp, synthetic construct
  source 1..20: mol_type = other DNA
gcgccactgcactccagcct

SEQ ID NO: 154332 - DNA, 20 bp, synthetic construct
  source 1..20: mol_type = other DNA
cgcgccactgcactccagcc

SEQ ID NO: 154333 - DNA, 20 bp, synthetic construct
  source 1..20: mol_type = other DNA
tcgcgccactgcactccagc

SEQ ID NO: 154334 - DNA, 20 bp, synthetic construct
  source 1..20: mol_type = other DNA
atcgcgccactgcactccag

SEQ ID NO: 154335 - DNA, 20 bp, synthetic construct
  source 1..20: mol_type = other DNA
gatcgcgccactgcactcca

SEQ ID NO: 154336 - DNA, 20 bp, synthetic construct
  source 1..20: mol_type = other DNA
agatcgcgccactgcactcc

SEQ ID NO: 154337 - DNA, 20 bp, synthetic construct
  source 1..20: mol_type = other DNA
gagatcgcgccactgcactc

SEQ ID NO: 154338 - DNA, 20 bp, synthetic construct
  source 1..20: mol_type = other DNA
cgagatcgcgccactgcact

SEQ ID NO: 154339 - DNA, 20 bp, synthetic construct
  source 1..20: mol_type = other DNA
ccgagatcgcgccactgcac

SEQ ID NO: 154340 - DNA, 20 bp, synthetic construct
  source 1..20: mol_type = other DNA
gccgagatcgcgccactgca

SEQ ID NO: 154341 - DNA, 20 bp, synthetic construct
  source 1..20: mol_type = other DNA
agccgagatcgcgccactgc

SEQ ID NO: 154342 - DNA, 20 bp, synthetic construct
  source 1..20: mol_type = other DNA
gagccgagatcgcgccactg

SEQ ID NO: 154343 - DNA, 20 bp, synthetic construct
  source 1..20: mol_type = other DNA
tgagccgagatcgcgccact

SEQ ID NO: 154344 - DNA, 20 bp, synthetic construct
  source 1..20: mol_type = other DNA
gtgagccgagatcgcgccac

SEQ ID NO: 154345 - DNA, 20 bp, synthetic construct
  source 1..20: mol_type = other DNA
agtgagccgagatcgcgcca

SEQ ID NO: 154346 - DNA, 20 bp, synthetic construct
  source 1..20: mol_type = other DNA
cagtgagccgagatcgcgcc

SEQ ID NO: 154347 - DNA, 20 bp, synthetic construct
  source 1..20: mol_type = other DNA
gcagtgagccgagatcgcgc

SEQ ID NO: 154348 - DNA, 20 bp, synthetic construct
  source 1..20: mol_type = other DNA
tgcagtgagccgagatcgcg

SEQ ID NO: 154349 - DNA, 20 bp, synthetic construct
  source 1..20: mol_type = other DNA
ttgcagtgagccgagatcgc

SEQ ID NO: 154350 - DNA, 20 bp, synthetic construct
  source 1..20: mol_type = other DNA
cttgcagtgagccgagatcg

SEQ ID NO: 154351 - DNA, 20 bp, synthetic construct
  source 1..20: mol_type = other DNA
gcttgcagtgagccgagatc

SEQ ID NO: 154352 - DNA, 20 bp, synthetic construct
  source 1..20: mol_type = other DNA
agcttgcagtgagccgagat

SEQ ID NO: 154353 - DNA, 20 bp, synthetic construct
  source 1..20: mol_type = other DNA
gagcttgcagtgagccgaga

SEQ ID NO: 154354 - DNA, 20 bp, synthetic construct
  source 1..20: mol_type = other DNA
ggagcttgcagtgagccgag

SEQ ID NO: 154355 - DNA, 20 bp, synthetic construct
  source 1..20: mol_type = other DNA
cggagcttgcagtgagccga

SEQ ID NO: 154356 - DNA, 20 bp, synthetic construct
  source 1..20: mol_type = other DNA
gcggagcttgcagtgagccg

SEQ ID NO: 154357 - DNA, 20 bp, synthetic construct
  source 1..20: mol_type = other DNA
ggcggagcttgcagtgagcc

SEQ ID NO: 154358 - DNA, 20 bp, synthetic construct
  source 1..20: mol_type = other DNA
aggcggagcttgcagtgagc

SEQ ID NO: 154359 - DNA, 20 bp, synthetic construct
  source 1..20: mol_type = other DNA
gaggcggagcttgcagtgag

SEQ ID NO: 154360 - DNA, 20 bp, synthetic construct
  source 1..20: mol_type = other DNA
ggaggcggagcttgcagtga

SEQ ID NO: 154361 - DNA, 20 bp, synthetic construct
  source 1..20: mol_type = other DNA
gggaggcggagcttgcagtg

SEQ ID NO: 154362 - DNA, 20 bp, synthetic construct
  source 1..20: mol_type = other DNA
cgggaggcggagcttgcagt

SEQ ID NO: 154363 - DNA, 20 bp, synthetic construct
  source 1..20: mol_type = other DNA
ccgggaggcggagcttgcag

SEQ ID NO: 154364 - DNA, 20 bp, synthetic construct
  source 1..20: mol_type = other DNA
cccgggaggcggagcttgca

SEQ ID NO: 154365 - DNA, 20 bp, synthetic construct
  source 1..20: mol_type = other DNA
acccgggaggcggagcttgc

SEQ ID NO: 154366 - DNA, 20 bp, synthetic construct
  source 1..20: mol_type = other DNA
aacccgggaggcggagcttg

SEQ ID NO: 154367 - DNA, 20 bp, synthetic construct
  source 1..20: mol_type = other DNA
gaacccgggaggcggagctt

SEQ ID NO: 154368 - DNA, 20 bp, synthetic construct
  source 1..20: mol_type = other DNA
tgaacccgggaggcggagct

SEQ ID NO: 154369 - DNA, 20 bp, synthetic construct
  source 1..20: mol_type = other DNA
atgaacccgggaggcggagc

SEQ ID NO: 154370 - DNA, 20 bp, synthetic construct
  source 1..20: mol_type = other DNA
catgaacccgggaggcggag

SEQ ID NO: 154371 - DNA, 20 bp, synthetic construct
  source 1..20: mol_type = other DNA
gcatgaacccgggaggcgga

SEQ ID NO: 154372 - DNA, 20 bp, synthetic construct
  source 1..20: mol_type = other DNA
ggcatgaacccgggaggcgg

SEQ ID NO: 154373 - DNA, 20 bp, synthetic construct
  source 1..20: mol_type = other DNA
tggcatgaacccgggaggcg

SEQ ID NO: 154374 - DNA, 20 bp, synthetic construct
  source 1..20: mol_type = other DNA
atggcatgaacccgggaggc

SEQ ID NO: 154375 - DNA, 20 bp, synthetic construct
  source 1..20: mol_type = other DNA
aatggcatgaacccgggagg

SEQ ID NO: 154376 - DNA, 20 bp, synthetic construct
  source 1..20: mol_type = other DNA
gaatggcatgaacccgggag

SEQ ID NO: 154377 - DNA, 20 bp, synthetic construct
  source 1..20: mol_type = other DNA
agaatggcatgaacccggga

SEQ ID NO: 154378 - DNA, 20 bp, synthetic construct
  source 1..20: mol_type = other DNA
gagaatggcatgaacccggg

SEQ ID NO: 154379 - DNA, 20 bp, synthetic construct
  source 1..20: mol_type = other DNA
ggagaatggcatgaacccgg

SEQ ID NO: 154380 - DNA, 20 bp, synthetic construct
  source 1..20: mol_type = other DNA
aggagaatggcatgaacccg

SEQ ID NO: 154381 - DNA, 20 bp, synthetic construct
  source 1..20: mol_type = other DNA
caggagaatggcatgaaccc

SEQ ID NO: 154382 - DNA, 20 bp, synthetic construct
  source 1..20: mol_type = other DNA
gcaggagaatggcatgaacc

SEQ ID NO: 154383 - DNA, 20 bp, synthetic construct
  source 1..20: mol_type = other DNA
ggcaggagaatggcatgaac

SEQ ID NO: 154384 - DNA, 20 bp, synthetic construct
  source 1..20: mol_type = other DNA
aggcaggagaatggcatgaa

SEQ ID NO: 154385 - DNA, 20 bp, synthetic construct
  source 1..20: mol_type = other DNA
gaggcaggagaatggcatga

SEQ ID NO: 154386 - DNA, 20 bp, synthetic construct
  source 1..20: mol_type = other DNA
tgaggcaggagaatggcatg

SEQ ID NO: 154387 - DNA, 20 bp, synthetic construct
  source 1..20: mol_type = other DNA
ctgaggcaggagaatggcat

SEQ ID NO: 154388 - DNA, 20 bp, synthetic construct
  source 1..20: mol_type = other DNA
gctgaggcaggagaatggca

SEQ ID NO: 154389 - DNA, 20 bp, synthetic construct
  source 1..20: mol_type = other DNA
ggctgaggcaggagaatggc

SEQ ID NO: 154390 - DNA, 20 bp, synthetic construct
  source 1..20: mol_type = other DNA
gggctgaggcaggagaatgg

SEQ ID NO: 154391 - DNA, 20 bp, synthetic construct
  source 1..20: mol_type = other DNA
ggggctgaggcaggagaatg

SEQ ID NO: 154392 - DNA, 20 bp, synthetic construct
  source 1..20: mol_type = other DNA
gggggctgaggcaggagaat

SEQ ID NO: 154393 - DNA, 20 bp, synthetic construct
  source 1..20: mol_type = other DNA
agggggctgaggcaggagaa

SEQ ID NO: 154394 - DNA, 20 bp, synthetic construct
  source 1..20: mol_type = other DNA
cagggggctgaggcaggaga

SEQ ID NO: 154395 - DNA, 20 bp, synthetic construct
  source 1..20: mol_type = other DNA
tcagggggctgaggcaggag

SEQ ID NO: 154396 - DNA, 20 bp, synthetic construct
  source 1..20: mol_type = other DNA
ctcagggggctgaggcagga

SEQ ID NO: 154397 - DNA, 20 bp, synthetic construct
  source 1..20: mol_type = other DNA
actcagggggctgaggcagg

SEQ ID NO: 154398 - DNA, 20 bp, synthetic construct
  source 1..20: mol_type = other DNA
tactcagggggctgaggcag

SEQ ID NO: 154399 - DNA, 20 bp, synthetic construct
  source 1..20: mol_type = other DNA
ctactcagggggctgaggca

SEQ ID NO: 154400 - DNA, 20 bp, synthetic construct
  source 1..20: mol_type = other DNA
gctactcagggggctgaggc

SEQ ID NO: 154401 - DNA, 20 bp, synthetic construct
  source 1..20: mol_type = other DNA
agctactcagggggctgagg

SEQ ID NO: 154402 - DNA, 20 bp, synthetic construct
  source 1..20: mol_type = other DNA
cagctactcagggggctgag

SEQ ID NO: 154403 - DNA, 20 bp, synthetic construct
  source 1..20: mol_type = other DNA
ccagctactcagggggctga

SEQ ID NO: 154404 - DNA, 20 bp, synthetic construct
  source 1..20: mol_type = other DNA
cccagctactcagggggctg

SEQ ID NO: 154405 - DNA, 20 bp, synthetic construct
  source 1..20: mol_type = other DNA
tcccagctactcagggggct

SEQ ID NO: 154406 - DNA, 20 bp, synthetic construct
  source 1..20: mol_type = other DNA
gtcccagctactcagggggc

SEQ ID NO: 154407 - DNA, 20 bp, synthetic construct
  source 1..20: mol_type = other DNA
agtcccagctactcaggggg

SEQ ID NO: 154408 - DNA, 20 bp, synthetic construct
  source 1..20: mol_type = other DNA
tagtcccagctactcagggg

SEQ ID NO: 154409 - DNA, 20 bp, synthetic construct
  source 1..20: mol_type = other DNA
gtagtcccagctactcaggg

SEQ ID NO: 154410 - DNA, 20 bp, synthetic construct
  source 1..20: mol_type = other DNA
tgtagtcccagctactcagg

SEQ ID NO: 154411 - DNA, 20 bp, synthetic construct
  source 1..20: mol_type = other DNA
ctgtagtcccagctactcag

SEQ ID NO: 154412 - DNA, 20 bp, synthetic construct
  source 1..20: mol_type = other DNA
cctgtagtcccagctactca

SEQ ID NO: 154413 - DNA, 20 bp, synthetic construct
  source 1..20: mol_type = other DNA
acctgtagtcccagctactc

SEQ ID NO: 154414 - DNA, 20 bp, synthetic construct
  source 1..20: mol_type = other DNA
cacctgtagtcccagctact

SEQ ID NO: 154415 - DNA, 20 bp, synthetic construct
  source 1..20: mol_type = other DNA
gcacctgtagtcccagctac

SEQ ID NO: 154416 - DNA, 20 bp, synthetic construct
  source 1..20: mol_type = other DNA
ggcacctgtagtcccagcta

SEQ ID NO: 154417 - DNA, 20 bp, synthetic construct
  source 1..20: mol_type = other DNA
gggcacctgtagtcccagct

SEQ ID NO: 154418 - DNA, 20 bp, synthetic construct
  source 1..20: mol_type = other DNA
cgggcacctgtagtcccagc

SEQ ID NO: 154419 - DNA, 20 bp, synthetic construct
  source 1..20: mol_type = other DNA
gcgggcacctgtagtcccag

SEQ ID NO: 154420 - DNA, 20 bp, synthetic construct
  source 1..20: mol_type = other DNA
ggcgggcacctgtagtccca

SEQ ID NO: 154421 - DNA, 20 bp, synthetic construct
  source 1..20: mol_type = other DNA
tggcgggcacctgtagtccc

SEQ ID NO: 154422 - DNA, 20 bp, synthetic construct
  source 1..20: mol_type = other DNA
gtggcgggcacctgtagtcc

SEQ ID NO: 154423 - DNA, 20 bp, synthetic construct
  source 1..20: mol_type = other DNA
ggtggcgggcacctgtagtc

SEQ ID NO: 154424 - DNA, 20 bp, synthetic construct
  source 1..20: mol_type = other DNA
gggtggcgggcacctgtagt

SEQ ID NO: 154425 - DNA, 20 bp, synthetic construct
  source 1..20: mol_type = other DNA
ggggtggcgggcacctgtag

SEQ ID NO: 154426 - DNA, 20 bp, synthetic construct
  source 1..20: mol_type = other DNA
cggggtggcgggcacctgta

SEQ ID NO: 154427 - DNA, 20 bp, synthetic construct
  source 1..20: mol_type = other DNA
gcggggtggcgggcacctgt

SEQ ID NO: 154428 - DNA, 20 bp, synthetic construct
  source 1..20: mol_type = other DNA
ggcggggtggcgggcacctg

SEQ ID NO: 154429 - DNA, 20 bp, synthetic construct
  source 1..20: mol_type = other DNA
aggcggggtggcgggcacct

SEQ ID NO: 154430 - DNA, 20 bp, synthetic construct
  source 1..20: mol_type = other DNA
caggcggggtggcgggcacc

SEQ ID NO: 154431 - DNA, 20 bp, synthetic construct
  source 1..20: mol_type = other DNA
ccaggcggggtggcgggcac

SEQ ID NO: 154432 - DNA, 20 bp, synthetic construct
  source 1..20: mol_type = other DNA
gccaggcggggtggcgggca

SEQ ID NO: 154433 - DNA, 20 bp, synthetic construct
  source 1..20: mol_type = other DNA
agccaggcggggtggcgggc

SEQ ID NO: 154434 - DNA, 20 bp, synthetic construct
  source 1..20: mol_type = other DNA
tagccaggcggggtggcggg

SEQ ID NO: 154435 - DNA, 20 bp, synthetic construct
  source 1..20: mol_type = other DNA
ttagccaggcggggtggcgg

SEQ ID NO: 154436 - DNA, 20 bp, synthetic construct
  source 1..20: mol_type = other DNA
attagccaggcggggtggcg

SEQ ID NO: 154437 - DNA, 20 bp, synthetic construct
  source 1..20: mol_type = other DNA
aattagccaggcggggtggc

SEQ ID NO: 154438 - DNA, 20 bp, synthetic construct
  source 1..20: mol_type = other DNA
aaattagccaggcggggtgg

SEQ ID NO: 154439 - DNA, 20 bp, synthetic construct
  source 1..20: mol_type = other DNA
aaaattagccaggcggggtg

SEQ ID NO: 154440 - DNA, 20 bp, synthetic construct
  source 1..20: mol_type = other DNA
aaaaattagccaggcggggt

SEQ ID NO: 154441 - DNA, 20 bp, synthetic construct
  source 1..20: mol_type = other DNA
aaaaaattagccaggcgggg

SEQ ID NO: 154442 - DNA, 20 bp, synthetic construct
  source 1..20: mol_type = other DNA
caaaaaattagccaggcggg

SEQ ID NO: 154443 - DNA, 20 bp, synthetic construct
  source 1..20: mol_type = other DNA
acaaaaaattagccaggcgg

SEQ ID NO: 154444 - DNA, 20 bp, synthetic construct
  source 1..20: mol_type = other DNA
tacaaaaaattagccaggcg

SEQ ID NO: 154445 - DNA, 20 bp, synthetic construct
  source 1..20: mol_type = other DNA
atacaaaaaattagccaggc

SEQ ID NO: 154446 - DNA, 20 bp, synthetic construct
  source 1..20: mol_type = other DNA
aatacaaaaaattagccagg

SEQ ID NO: 154447 - DNA, 20 bp, synthetic construct
  source 1..20: mol_type = other DNA
aaatacaaaaaattagccag

SEQ ID NO: 154448 - DNA, 20 bp, synthetic construct
  source 1..20: mol_type = other DNA
aaaatacaaaaaattagcca

SEQ ID NO: 154449 - DNA, 20 bp, synthetic construct
  source 1..20: mol_type = other DNA
aaaaatacaaaaaattagcc

SEQ ID NO: 154450 - DNA, 20 bp, synthetic construct
  source 1..20: mol_type = other DNA
taaaaatacaaaaaattagc

SEQ ID NO: 154451 - DNA, 20 bp, synthetic construct
  source 1..20: mol_type = other DNA
ctaaaaatacaaaaaattag

SEQ ID NO: 154452 - DNA, 20 bp, synthetic construct
  source 1..20: mol_type = other DNA
actaaaaatacaaaaaatta

SEQ ID NO: 154453 - DNA, 20 bp, synthetic construct
  source 1..20: mol_type = other DNA
tactaaaaatacaaaaaatt

SEQ ID NO: 154454 - DNA, 20 bp, synthetic construct
  source 1..20: mol_type = other DNA
ctactaaaaatacaaaaaat

SEQ ID NO: 154455 - DNA, 20 bp, synthetic construct
  source 1..20: mol_type = other DNA
tctactaaaaatacaaaaaa

SEQ ID NO: 154456 - DNA, 20 bp, synthetic construct
  source 1..20: mol_type = other DNA
ctctactaaaaatacaaaaa

SEQ ID NO: 154457 - DNA, 20 bp, synthetic construct
  source 1..20: mol_type = other DNA
tctctactaaaaatacaaaa

SEQ ID NO: 154458 - DNA, 20 bp, synthetic construct
  source 1..20: mol_type = other DNA
gtctctactaaaaatacaaa

SEQ ID NO: 154459 - DNA, 20 bp, synthetic construct
  source 1..20: mol_type = other DNA
cgtctctactaaaaatacaa

SEQ ID NO: 154460 - DNA, 20 bp, synthetic construct
  source 1..20: mol_type = other DNA
ccgtctctactaaaaataca

SEQ ID NO: 154461 - DNA, 20 bp, synthetic construct
  source 1..20: mol_type = other DNA
cccgtctctactaaaaatac

SEQ ID NO: 154462 - DNA, 20 bp, synthetic construct
  source 1..20: mol_type = other DNA
ccccgtctctactaaaaata

SEQ ID NO: 154463 - DNA, 20 bp, synthetic construct
  source 1..20: mol_type = other DNA
accccgtctctactaaaaat

SEQ ID NO: 154464 - DNA, 20 bp, synthetic construct
  source 1..20: mol_type = other DNA
aaccccgtctctactaaaaa

SEQ ID NO: 154465 - DNA, 20 bp, synthetic construct
  source 1..20: mol_type = other DNA
aaaccccgtctctactaaaa

SEQ ID NO: 154466 - DNA, 20 bp, synthetic construct
  source 1..20: mol_type = other DNA
gaaaccccgtctctactaaa

SEQ ID NO: 154467 - DNA, 20 bp, synthetic construct
  source 1..20: mol_type = other DNA
tgaaaccccgtctctactaa

SEQ ID NO: 154468 - DNA, 20 bp, synthetic construct
  source 1..20: mol_type = other DNA
gtgaaaccccgtctctacta

SEQ ID NO: 154469 - DNA, 20 bp, synthetic construct
  source 1..20: mol_type = other DNA
agtgaaaccccgtctctact

SEQ ID NO: 154470 - DNA, 20 bp, synthetic construct
  source 1..20: mol_type = other DNA
cagtgaaaccccgtctctac

SEQ ID NO: 154471 - DNA, 20 bp, synthetic construct
  source 1..20: mol_type = other DNA
acagtgaaaccccgtctcta

SEQ ID NO: 154472 - DNA, 20 bp, synthetic construct
  source 1..20: mol_type = other DNA
cacagtgaaaccccgtctct

SEQ ID NO: 154473 - DNA, 20 bp, synthetic construct
  source 1..20: mol_type = other DNA
acacagtgaaaccccgtctc

SEQ ID NO: 154474 - DNA, 20 bp, synthetic construct
  source 1..20: mol_type = other DNA
aacacagtgaaaccccgtct

SEQ ID NO: 154475 - DNA, 20 bp, synthetic construct
  source 1..20: mol_type = other DNA
taacacagtgaaaccccgtc

SEQ ID NO: 154476 - DNA, 20 bp, synthetic construct
  source 1..20: mol_type = other DNA
ctaacacagtgaaaccccgt

SEQ ID NO: 154477 - DNA, 20 bp, synthetic construct
  source 1..20: mol_type = other DNA
gctaacacagtgaaaccccg

SEQ ID NO: 154478 - DNA, 20 bp, synthetic construct
  source 1..20: mol_type = other DNA
ggctaacacagtgaaacccc

SEQ ID NO: 154479 - DNA, 20 bp, synthetic construct
  source 1..20: mol_type = other DNA
tggctaacacagtgaaaccc

SEQ ID NO: 154480 - DNA, 20 bp, synthetic construct
  source 1..20: mol_type = other DNA
ttggctaacacagtgaaacc

SEQ ID NO: 154481 - DNA, 20 bp, synthetic construct
  source 1..20: mol_type = other DNA
cttggctaacacagtgaaac

SEQ ID NO: 154482 - DNA, 20 bp, synthetic construct
  source 1..20: mol_type = other DNA
tcttggctaacacagtgaaa

SEQ ID NO: 154483 - DNA, 20 bp, synthetic construct
  source 1..20: mol_type = other DNA
atcttggctaacacagtgaa

SEQ ID NO: 154484 - DNA, 20 bp, synthetic construct
  source 1..20: mol_type = other DNA
catcttggctaacacagtga

SEQ ID NO: 154485 - DNA, 20 bp, synthetic construct
  source 1..20: mol_type = other DNA
ccatcttggctaacacagtg

SEQ ID NO: 154486 - DNA, 20 bp, synthetic construct
  source 1..20: mol_type = other DNA
accatcttggctaacacagt

SEQ ID NO: 154487 - DNA, 20 bp, synthetic construct
  source 1..20: mol_type = other DNA
gaccatcttggctaacacag

SEQ ID NO: 154488 - DNA, 20 bp, synthetic construct
  source 1..20: mol_type = other DNA
agaccatcttggctaacaca

SEQ ID NO: 154489 - DNA, 20 bp, synthetic construct
  source 1..20: mol_type = other DNA
gagaccatcttggctaacac

SEQ ID NO: 154490 - DNA, 20 bp, synthetic construct
  source 1..20: mol_type = other DNA
agagaccatcttggctaaca

SEQ ID NO: 154491 - DNA, 20 bp, synthetic construct
  source 1..20: mol_type = other DNA
gagagaccatcttggctaac

SEQ ID NO: 154492 - DNA, 20 bp, synthetic construct
  source 1..20: mol_type = other DNA
agagagaccatcttggctaa

SEQ ID NO: 154493 - DNA, 20 bp, synthetic construct
  source 1..20: mol_type = other DNA
gagagagaccatcttggcta

SEQ ID NO: 154494 - DNA, 20 bp, synthetic construct
  source 1..20: mol_type = other DNA
ggagagagaccatcttggct

SEQ ID NO: 154495 - DNA, 20 bp, synthetic construct
  source 1..20: mol_type = other DNA
aggagagagaccatcttggc

SEQ ID NO: 154496 - DNA, 20 bp, synthetic construct
  source 1..20: mol_type = other DNA
caggagagagaccatcttgg

SEQ ID NO: 154497 - DNA, 20 bp, synthetic construct
  source 1..20: mol_type = other DNA
tcaggagagagaccatcttg

SEQ ID NO: 154498 - DNA, 20 bp, synthetic construct
  source 1..20: mol_type = other DNA
gtcaggagagagaccatctt

SEQ ID NO: 154499 - DNA, 20 bp, synthetic construct
  source 1..20: mol_type = other DNA
ggtcaggagagagaccatct

SEQ ID NO: 154500 - DNA, 20 bp, synthetic construct
  source 1..20: mol_type = other DNA
aggtcaggagagagaccatc

SEQ ID NO: 154501 - DNA, 20 bp, synthetic construct
  source 1..20: mol_type = other DNA
gaggtcaggagagagaccat

SEQ ID NO: 154502 - DNA, 20 bp, synthetic construct
  source 1..20: mol_type = other DNA
cgaggtcaggagagagacca

SEQ ID NO: 154503 - DNA, 20 bp, synthetic construct
  source 1..20: mol_type = other DNA
acgaggtcaggagagagacc

SEQ ID NO: 154504 - DNA, 20 bp, synthetic construct
  source 1..20: mol_type = other DNA
cacgaggtcaggagagagac

SEQ ID NO: 154505 - DNA, 20 bp, synthetic construct
  source 1..20: mol_type = other DNA
tcacgaggtcaggagagaga

SEQ ID NO: 154506 - DNA, 20 bp, synthetic construct
  source 1..20: mol_type = other DNA
atcacgaggtcaggagagag

SEQ ID NO: 154507 - DNA, 20 bp, synthetic construct
  source 1..20: mol_type = other DNA
gatcacgaggtcaggagaga

SEQ ID NO: 154508 - DNA, 20 bp, synthetic construct
  source 1..20: mol_type = other DNA
ggatcacgaggtcaggagag

SEQ ID NO: 154509 - DNA, 20 bp, synthetic construct
  source 1..20: mol_type = other DNA
cggatcacgaggtcaggaga

SEQ ID NO: 154510 - DNA, 20 bp, synthetic construct
  source 1..20: mol_type = other DNA
gcggatcacgaggtcaggag

SEQ ID NO: 154511 - DNA, 20 bp, synthetic construct
  source 1..20: mol_type = other DNA
ggcggatcacgaggtcagga

SEQ ID NO: 154512 - DNA, 20 bp, synthetic construct
  source 1..20: mol_type = other DNA
aggcggatcacgaggtcagg

SEQ ID NO: 154513 - DNA, 20 bp, synthetic construct
  source 1..20: mol_type = other DNA
caggcggatcacgaggtcag

SEQ ID NO: 154514 - DNA, 20 bp, synthetic construct
  source 1..20: mol_type = other DNA
acaggcggatcacgaggtca

SEQ ID NO: 154515 - DNA, 20 bp, synthetic construct
  source 1..20: mol_type = other DNA
gacaggcggatcacgaggtc

SEQ ID NO: 154516 - DNA, 20 bp, synthetic construct
  source 1..20: mol_type = other DNA
agacaggcggatcacgaggt

SEQ ID NO: 154517 - DNA, 20 bp, synthetic construct
  source 1..20: mol_type = other DNA
gagacaggcggatcacgagg

SEQ ID NO: 154518 - DNA, 20 bp, synthetic construct
  source 1..20: mol_type = other DNA
tgagacaggcggatcacgag

SEQ ID NO: 154519 - DNA, 20 bp, synthetic construct
  source 1..20: mol_type = other DNA
ctgagacaggcggatcacga

SEQ ID NO: 154520 - DNA, 20 bp, synthetic construct
  source 1..20: mol_type = other DNA
gctgagacaggcggatcacg

SEQ ID NO: 154521 - DNA, 20 bp, synthetic construct
  source 1..20: mol_type = other DNA
ggctgagacaggcggatcac

SEQ ID NO: 154522 - DNA, 20 bp, synthetic construct
  source 1..20: mol_type = other DNA
aggctgagacaggcggatca

SEQ ID NO: 154523 - DNA, 20 bp, synthetic construct
  source 1..20: mol_type = other DNA
gaggctgagacaggcggatc

SEQ ID NO: 154524 - DNA, 20 bp, synthetic construct
  source 1..20: mol_type = other DNA
ggaggctgagacaggcggat

SEQ ID NO: 154525 - DNA, 20 bp, synthetic construct
  source 1..20: mol_type = other DNA
gggaggctgagacaggcgga

SEQ ID NO: 154526 - DNA, 20 bp, synthetic construct
  source 1..20: mol_type = other DNA
tgggaggctgagacaggcgg

SEQ ID NO: 154527 - DNA, 20 bp, synthetic construct
  source 1..20: mol_type = other DNA
ttgggaggctgagacaggcg

SEQ ID NO: 154528 - DNA, 20 bp, synthetic construct
  source 1..20: mol_type = other DNA
tttgggaggctgagacaggc

SEQ ID NO: 154529 - DNA, 20 bp, synthetic construct
  source 1..20: mol_type = other DNA
ctttgggaggctgagacagg

SEQ ID NO: 154530 - DNA, 20 bp, synthetic construct
  source 1..20: mol_type = other DNA
actttgggaggctgagacag

SEQ ID NO: 154531 - DNA, 20 bp, synthetic construct
  source 1..20: mol_type = other DNA
cactttgggaggctgagaca

SEQ ID NO: 154532 - DNA, 20 bp, synthetic construct
  source 1..20: mol_type = other DNA
gcactttgggaggctgagac

SEQ ID NO: 154533 - DNA, 20 bp, synthetic construct
  source 1..20: mol_type = other DNA
agcactttgggaggctgaga

SEQ ID NO: 154534 - DNA, 20 bp, synthetic construct
  source 1..20: mol_type = other DNA
cagcactttgggaggctgag

SEQ ID NO: 154535 - DNA, 20 bp, synthetic construct
  source 1..20: mol_type = other DNA
ccagcactttgggaggctga

SEQ ID NO: 154536 - DNA, 20 bp, synthetic construct
  source 1..20: mol_type = other DNA
cccagcactttgggaggctg

SEQ ID NO: 154537 - DNA, 20 bp, synthetic construct
  source 1..20: mol_type = other DNA
tcccagcactttgggaggct

SEQ ID NO: 154538 - DNA, 20 bp, synthetic construct
  source 1..20: mol_type = other DNA
atcccagcactttgggaggc

SEQ ID NO: 154539 - DNA, 20 bp, synthetic construct
  source 1..20: mol_type = other DNA
aatcccagcactttgggagg

SEQ ID NO: 154540 - DNA, 20 bp, synthetic construct
  source 1..20: mol_type = other DNA
taatcccagcactttgggag

SEQ ID NO: 154541 - DNA, 20 bp, synthetic construct
  source 1..20: mol_type = other DNA
gtaatcccagcactttggga

SEQ ID NO: 154542 - DNA, 20 bp, synthetic construct
  source 1..20: mol_type = other DNA
tgtaatcccagcactttggg

SEQ ID NO: 154543 - DNA, 20 bp, synthetic construct
  source 1..20: mol_type = other DNA
ctgtaatcccagcactttgg

SEQ ID NO: 154544 - DNA, 20 bp, synthetic construct
  source 1..20: mol_type = other DNA
cctgtaatcccagcactttg

SEQ ID NO: 154545 - DNA, 20 bp, synthetic construct
  source 1..20: mol_type = other DNA
gcctgtaatcccagcacttt

SEQ ID NO: 154546 - DNA, 20 bp, synthetic construct
  source 1..20: mol_type = other DNA
tgcctgtaatcccagcactt

SEQ ID NO: 154547 - DNA, 20 bp, synthetic construct
  source 1..20: mol_type = other DNA
atgcctgtaatcccagcact

SEQ ID NO: 154548 - DNA, 20 bp, synthetic construct
  source 1..20: mol_type = other DNA
catgcctgtaatcccagcac

SEQ ID NO: 154549 - DNA, 20 bp, synthetic construct
  source 1..20: mol_type = other DNA
tcatgcctgtaatcccagca

SEQ ID NO: 154550 - DNA, 20 bp, synthetic construct
  source 1..20: mol_type = other DNA
ctcatgcctgtaatcccagc

SEQ ID NO: 154551 - DNA, 20 bp, synthetic construct
  source 1..20: mol_type = other DNA
gctcatgcctgtaatcccag

SEQ ID NO: 154552 - DNA, 20 bp, synthetic construct
  source 1..20: mol_type = other DNA
ggctcatgcctgtaatccca

SEQ ID NO: 154553 - DNA, 20 bp, synthetic construct
  source 1..20: mol_type = other DNA
tggctcatgcctgtaatccc

SEQ ID NO: 154554 - DNA, 20 bp, synthetic construct
  source 1..20: mol_type = other DNA
gtggctcatgcctgtaatcc

SEQ ID NO: 154555 - DNA, 20 bp, synthetic construct
  source 1..20: mol_type = other DNA
ggtggctcatgcctgtaatc

SEQ ID NO: 154556 - DNA, 20 bp, synthetic construct
  source 1..20: mol_type = other DNA
cggtggctcatgcctgtaat

SEQ ID NO: 154557 - DNA, 20 bp, synthetic construct
  source 1..20: mol_type = other DNA
gcggtggctcatgcctgtaa

SEQ ID NO: 154558 - DNA, 20 bp, synthetic construct
  source 1..20: mol_type = other DNA
tgcggtggctcatgcctgta

SEQ ID NO: 154559 - DNA, 20 bp, synthetic construct
  source 1..20: mol_type = other DNA
gtgcggtggctcatgcctgt

SEQ ID NO: 154560 - DNA, 20 bp, synthetic construct
  source 1..20: mol_type = other DNA
ggtgcggtggctcatgcctg

SEQ ID NO: 154561 - DNA, 20 bp, synthetic construct
  source 1..20: mol_type = other DNA
gggtgcggtggctcatgcct

SEQ ID NO: 154562 - DNA, 20 bp, synthetic construct
  source 1..20: mol_type = other DNA
tgggtgcggtggctcatgcc

SEQ ID NO: 154563 - DNA, 20 bp, synthetic construct
  source 1..20: mol_type = other DNA
ctgggtgcggtggctcatgc

SEQ ID NO: 154564 - DNA, 20 bp, synthetic construct
  source 1..20: mol_type = other DNA
gctgggtgcggtggctcatg

SEQ ID NO: 154565 - DNA, 20 bp, synthetic construct
  source 1..20: mol_type = other DNA
ggctgggtgcggtggctcat

SEQ ID NO: 154566 - DNA, 20 bp, synthetic construct
  source 1..20: mol_type = other DNA
tggctgggtgcggtggctca

SEQ ID NO: 154567 - DNA, 20 bp, synthetic construct
  source 1..20: mol_type = other DNA
ctggctgggtgcggtggctc

SEQ ID NO: 154568 - DNA, 20 bp, synthetic construct
  source 1..20: mol_type = other DNA
tctggctgggtgcggtggct

SEQ ID NO: 154569 - DNA, 20 bp, synthetic construct
  source 1..20: mol_type = other DNA
ttctggctgggtgcggtggc

SEQ ID NO: 154570 - DNA, 20 bp, synthetic construct
  source 1..20: mol_type = other DNA
cttctggctgggtgcggtgg

SEQ ID NO: 154571 - DNA, 20 bp, synthetic construct
  source 1..20: mol_type = other DNA
tcttctggctgggtgcggtg

SEQ ID NO: 154572 - DNA, 20 bp, synthetic construct
  source 1..20: mol_type = other DNA
ctcttctggctgggtgcggt

SEQ ID NO: 154573 - DNA, 20 bp, synthetic construct
  source 1..20: mol_type = other DNA
cctcttctggctgggtgcgg

SEQ ID NO: 154574 - DNA, 20 bp, synthetic construct
  source 1..20: mol_type = other DNA
ccctcttctggctgggtgcg

SEQ ID NO: 154575 - DNA, 20 bp, synthetic construct
  source 1..20: mol_type = other DNA
accctcttctggctgggtgc

SEQ ID NO: 154576 - DNA, 20 bp, synthetic construct
  source 1..20: mol_type = other DNA
caccctcttctggctgggtg

SEQ ID NO: 154577 - DNA, 20 bp, synthetic construct
  source 1..20: mol_type = other DNA
acaccctcttctggctgggt

SEQ ID NO: 154578 - DNA, 20 bp, synthetic construct
  source 1..20: mol_type = other DNA
aacaccctcttctggctggg

SEQ ID NO: 154579 - DNA, 20 bp, synthetic construct
  source 1..20: mol_type = other DNA
aaacaccctcttctggctgg

SEQ ID NO: 154580 - DNA, 20 bp, synthetic construct
  source 1..20: mol_type = other DNA
aaaacaccctcttctggctg

SEQ ID NO: 154581 - DNA, 20 bp, synthetic construct
  source 1..20: mol_type = other DNA
aaaaacaccctcttctggct

SEQ ID NO: 154582 - DNA, 20 bp, synthetic construct
  source 1..20: mol_type = other DNA
aaaaaacaccctcttctggc

SEQ ID NO: 154583 - DNA, 20 bp, synthetic construct
  source 1..20: mol_type = other DNA
taaaaaacaccctcttctgg

SEQ ID NO: 154584 - DNA, 20 bp, synthetic construct
  source 1..20: mol_type = other DNA
ttaaaaaacaccctcttctg

SEQ ID NO: 154585 - DNA, 20 bp, synthetic construct
  source 1..20: mol_type = other DNA
tttaaaaaacaccctcttct

SEQ ID NO: 154586 - DNA, 20 bp, synthetic construct
  source 1..20: mol_type = other DNA
ctttaaaaaacaccctcttc

SEQ ID NO: 154587 - DNA, 20 bp, synthetic construct
  source 1..20: mol_type = other DNA
tctttaaaaaacaccctctt

SEQ ID NO: 154588 - DNA, 20 bp, synthetic construct
  source 1..20: mol_type = other DNA
ttctttaaaaaacaccctct

SEQ ID NO: 154589 - DNA, 20 bp, synthetic construct
  source 1..20: mol_type = other DNA
cttctttaaaaaacaccctc

SEQ ID NO: 154590 - DNA, 20 bp, synthetic construct
  source 1..20: mol_type = other DNA
ccttctttaaaaaacaccct

SEQ ID NO: 154591 - DNA, 20 bp, synthetic construct
  source 1..20: mol_type = other DNA
gccttctttaaaaaacaccc

SEQ ID NO: 154592 - DNA, 20 bp, synthetic construct
  source 1..20: mol_type = other DNA
tgccttctttaaaaaacacc

SEQ ID NO: 154593 - DNA, 20 bp, synthetic construct
  source 1..20: mol_type = other DNA
ttgccttctttaaaaaacac

SEQ ID NO: 154594 - DNA, 20 bp, synthetic construct
  source 1..20: mol_type = other DNA
tttgccttctttaaaaaaca

SEQ ID NO: 154595 - DNA, 20 bp, synthetic construct
  source 1..20: mol_type = other DNA
atttgccttctttaaaaaac

SEQ ID NO: 154596 - DNA, 20 bp, synthetic construct
  source 1..20: mol_type = other DNA
tatttgccttctttaaaaaa

SEQ ID NO: 154597 - DNA, 20 bp, synthetic construct
  source 1..20: mol_type = other DNA
ctatttgccttctttaaaaa

SEQ ID NO: 154598 - DNA, 20 bp, synthetic construct
  source 1..20: mol_type = other DNA
cctatttgccttctttaaaa

SEQ ID NO: 154599 - DNA, 20 bp, synthetic construct
  source 1..20: mol_type = other DNA
tcctatttgccttctttaaa

SEQ ID NO: 154600 - DNA, 20 bp, synthetic construct
  source 1..20: mol_type = other DNA
ttcctatttgccttctttaa

SEQ ID NO: 154601 - DNA, 20 bp, synthetic construct
  source 1..20: mol_type = other DNA
tttcctatttgccttcttta

SEQ ID NO: 154602 - DNA, 20 bp, synthetic construct
  source 1..20: mol_type = other DNA
atttcctatttgccttcttt

SEQ ID NO: 154603 - DNA, 20 bp, synthetic construct
  source 1..20: mol_type = other DNA
tatttcctatttgccttctt

SEQ ID NO: 154604 - DNA, 20 bp, synthetic construct
  source 1..20: mol_type = other DNA
ttatttcctatttgccttct

SEQ ID NO: 154605 - DNA, 20 bp, synthetic construct
  source 1..20: mol_type = other DNA
tttatttcctatttgccttc

SEQ ID NO: 154606 - DNA, 20 bp, synthetic construct
  source 1..20: mol_type = other DNA
ttttatttcctatttgcctt

SEQ ID NO: 154607 - DNA, 20 bp, synthetic construct
  source 1..20: mol_type = other DNA
tttttatttcctatttgcct

SEQ ID NO: 154608 - DNA, 20 bp, synthetic construct
  source 1..20: mol_type = other DNA
gtttttatttcctatttgcc

SEQ ID NO: 154609 - DNA, 20 bp, synthetic construct
  source 1..20: mol_type = other DNA
agtttttatttcctatttgc

SEQ ID NO: 154610 - DNA, 20 bp, synthetic construct
  source 1..20: mol_type = other DNA
aagtttttatttcctatttg

SEQ ID NO: 154611 - DNA, 20 bp, synthetic construct
  source 1..20: mol_type = other DNA
caagtttttatttcctattt

SEQ ID NO: 154612 - DNA, 20 bp, synthetic construct
  source 1..20: mol_type = other DNA
ccaagtttttatttcctatt

SEQ ID NO: 154613 - DNA, 20 bp, synthetic construct
  source 1..20: mol_type = other DNA
cccaagtttttatttcctat

SEQ ID NO: 154614 - DNA, 20 bp, synthetic construct
  source 1..20: mol_type = other DNA
gcccaagtttttatttccta

SEQ ID NO: 154615 - DNA, 20 bp, synthetic construct
  source 1..20: mol_type = other DNA
agcccaagtttttatttcct

SEQ ID NO: 154616 - DNA, 20 bp, synthetic construct
  source 1..20: mol_type = other DNA
gagcccaagtttttatttcc

SEQ ID NO: 154617 - DNA, 20 bp, synthetic construct
  source 1..20: mol_type = other DNA
agagcccaagtttttatttc

SEQ ID NO: 154618 - DNA, 20 bp, synthetic construct
  source 1..20: mol_type = other DNA
aagagcccaagtttttattt

SEQ ID NO: 154619 - DNA, 20 bp, synthetic construct
  source 1..20: mol_type = other DNA
taagagcccaagtttttatt

SEQ ID NO: 154620 - DNA, 20 bp, synthetic construct
  source 1..20: mol_type = other DNA
ttaagagcccaagtttttat

SEQ ID NO: 154621 - DNA, 20 bp, synthetic construct
  source 1..20: mol_type = other DNA
gttaagagcccaagttttta

SEQ ID NO: 154622 - DNA, 20 bp, synthetic construct
  source 1..20: mol_type = other DNA
agttaagagcccaagttttt

SEQ ID NO: 154623 - DNA, 20 bp, synthetic construct
  source 1..20: mol_type = other DNA
aagttaagagcccaagtttt

SEQ ID NO: 154624 - DNA, 20 bp, synthetic construct
  source 1..20: mol_type = other DNA
aaagttaagagcccaagttt

SEQ ID NO: 154625 - DNA, 20 bp, synthetic construct
  source 1..20: mol_type = other DNA
aaaagttaagagcccaagtt

SEQ ID NO: 154626 - DNA, 20 bp, synthetic construct
  source 1..20: mol_type = other DNA
caaaagttaagagcccaagt

SEQ ID NO: 154627 - DNA, 20 bp, synthetic construct
  source 1..20: mol_type = other DNA
acaaaagttaagagcccaag

SEQ ID NO: 154628 - DNA, 20 bp, synthetic construct
  source 1..20: mol_type = other DNA
tacaaaagttaagagcccaa

SEQ ID NO: 154629 - DNA, 20 bp, synthetic construct
  source 1..20: mol_type = other DNA
ttacaaaagttaagagccca

SEQ ID NO: 154630 - DNA, 20 bp, synthetic construct
  source 1..20: mol_type = other DNA
attacaaaagttaagagccc

SEQ ID NO: 154631 - DNA, 20 bp, synthetic construct
  source 1..20: mol_type = other DNA
cattacaaaagttaagagcc

SEQ ID NO: 154632 - DNA, 20 bp, synthetic construct
  source 1..20: mol_type = other DNA
tcattacaaaagttaagagc

SEQ ID NO: 154633 - DNA, 20 bp, synthetic construct
  source 1..20: mol_type = other DNA
atcattacaaaagttaagag

SEQ ID NO: 154634 - DNA, 20 bp, synthetic construct
  source 1..20: mol_type = other DNA
gatcattacaaaagttaaga

SEQ ID NO: 154635 - DNA, 20 bp, synthetic construct
  source 1..20: mol_type = other DNA
ggatcattacaaaagttaag

SEQ ID NO: 154636 - DNA, 20 bp, synthetic construct
  source 1..20: mol_type = other DNA
gggatcattacaaaagttaa

SEQ ID NO: 154637 - DNA, 20 bp, synthetic construct
  source 1..20: mol_type = other DNA
tgggatcattacaaaagtta

SEQ ID NO: 154638 - DNA, 20 bp, synthetic construct
  source 1..20: mol_type = other DNA
ctgggatcattacaaaagtt

SEQ ID NO: 154639 - DNA, 20 bp, synthetic construct
  source 1..20: mol_type = other DNA
cctgggatcattacaaaagt

SEQ ID NO: 154640 - DNA, 20 bp, synthetic construct
  source 1..20: mol_type = other DNA
acctgggatcattacaaaag

SEQ ID NO: 154641 - DNA, 20 bp, synthetic construct
  source 1..20: mol_type = other DNA
cacctgggatcattacaaaa

SEQ ID NO: 154642 - DNA, 20 bp, synthetic construct
  source 1..20: mol_type = other DNA
acacctgggatcattacaaa

SEQ ID NO: 154643 - DNA, 20 bp, synthetic construct
  source 1..20: mol_type = other DNA
aacacctgggatcattacaa

SEQ ID NO: 154644 - DNA, 20 bp, synthetic construct
  source 1..20: mol_type = other DNA
aaacacctgggatcattaca

SEQ ID NO: 154645 - DNA, 20 bp, synthetic construct
  source 1..20: mol_type = other DNA
caaacacctgggatcattac

SEQ ID NO: 154646 - DNA, 20 bp, synthetic construct
  source 1..20: mol_type = other DNA
tcaaacacctgggatcatta

SEQ ID NO: 154647 - DNA, 20 bp, synthetic construct
  source 1..20: mol_type = other DNA
ctcaaacacctgggatcatt

SEQ ID NO: 154648 - DNA, 20 bp, synthetic construct
  source 1..20: mol_type = other DNA
gctcaaacacctgggatcat

SEQ ID NO: 154649 - DNA, 20 bp, synthetic construct
  source 1..20: mol_type = other DNA
agctcaaacacctgggatca

SEQ ID NO: 154650 - DNA, 20 bp, synthetic construct
  source 1..20: mol_type = other DNA
cagctcaaacacctgggatc

SEQ ID NO: 154651 - DNA, 20 bp, synthetic construct
  source 1..20: mol_type = other DNA
ccagctcaaacacctgggat

SEQ ID NO: 154652 - DNA, 20 bp, synthetic construct
  source 1..20: mol_type = other DNA
cccagctcaaacacctggga

SEQ ID NO: 154653 - DNA, 20 bp, synthetic construct
  source 1..20: mol_type = other DNA
ccccagctcaaacacctggg

SEQ ID NO: 154654 - DNA, 20 bp, synthetic construct
  source 1..20: mol_type = other DNA
cccccagctcaaacacctgg

SEQ ID NO: 154655 - DNA, 20 bp, synthetic construct
  source 1..20: mol_type = other DNA
acccccagctcaaacacctg

SEQ ID NO: 154656 - DNA, 20 bp, synthetic construct
  source 1..20: mol_type = other DNA
aacccccagctcaaacacct

SEQ ID NO: 154657 - DNA, 20 bp, synthetic construct
  source 1..20: mol_type = other DNA
caacccccagctcaaacacc

SEQ ID NO: 154658 - DNA, 20 bp, synthetic construct
  source 1..20: mol_type = other DNA
tcaacccccagctcaaacac

SEQ ID NO: 154659 - DNA, 20 bp, synthetic construct
  source 1..20: mol_type = other DNA
ctcaacccccagctcaaaca

SEQ ID NO: 154660 - DNA, 20 bp, synthetic construct
  source 1..20: mol_type = other DNA
cctcaacccccagctcaaac

SEQ ID NO: 154661 - DNA, 20 bp, synthetic construct
  source 1..20: mol_type = other DNA
ccctcaacccccagctcaaa

SEQ ID NO: 154662 - DNA, 20 bp, synthetic construct
  source 1..20: mol_type = other DNA
accctcaacccccagctcaa

SEQ ID NO: 154663 - DNA, 20 bp, synthetic construct
  source 1..20: mol_type = other DNA
caccctcaacccccagctca

SEQ ID NO: 154664 - DNA, 20 bp, synthetic construct
  source 1..20: mol_type = other DNA
ccaccctcaacccccagctc

SEQ ID NO: 154665 - DNA, 20 bp, synthetic construct
  source 1..20: mol_type = other DNA
cccaccctcaacccccagct

SEQ ID NO: 154666 - DNA, 20 bp, synthetic construct
  source 1..20: mol_type = other DNA
acccaccctcaacccccagc

SEQ ID NO: 154667 - DNA, 20 bp, synthetic construct
  source 1..20: mol_type = other DNA
cacccaccctcaacccccag

SEQ ID NO: 154668 - DNA, 20 bp, synthetic construct
  source 1..20: mol_type = other DNA
gcacccaccctcaaccccca

SEQ ID NO: 154669 - DNA, 20 bp, synthetic construct
  source 1..20: mol_type = other DNA
ggcacccaccctcaaccccc

SEQ ID NO: 154670 - DNA, 20 bp, synthetic construct
  source 1..20: mol_type = other DNA
aggcacccaccctcaacccc

SEQ ID NO: 154671 - DNA, 20 bp, synthetic construct
  source 1..20: mol_type = other DNA
gaggcacccaccctcaaccc

SEQ ID NO: 154672 - DNA, 20 bp, synthetic construct
  source 1..20: mol_type = other DNA
cgaggcacccaccctcaacc

SEQ ID NO: 154673 - DNA, 20 bp, synthetic construct
  source 1..20: mol_type = other DNA
tcgaggcacccaccctcaac

SEQ ID NO: 154674 - DNA, 20 bp, synthetic construct
  source 1..20: mol_type = other DNA
ctcgaggcacccaccctcaa

SEQ ID NO: 154675 - DNA, 20 bp, synthetic construct
  source 1..20: mol_type = other DNA
gctcgaggcacccaccctca

SEQ ID NO: 154676 - DNA, 20 bp, synthetic construct
  source 1..20: mol_type = other DNA
tgctcgaggcacccaccctc

SEQ ID NO: 154677 - DNA, 20 bp, synthetic construct
  source 1..20: mol_type = other DNA
ttgctcgaggcacccaccct

SEQ ID NO: 154678 - DNA, 20 bp, synthetic construct
  source 1..20: mol_type = other DNA
tttgctcgaggcacccaccc

SEQ ID NO: 154679 - DNA, 20 bp, synthetic construct
  source 1..20: mol_type = other DNA
ctttgctcgaggcacccacc

SEQ ID NO: 154680 - DNA, 20 bp, synthetic construct
  source 1..20: mol_type = other DNA
cctttgctcgaggcacccac

SEQ ID NO: 154681 - DNA, 20 bp, synthetic construct
  source 1..20: mol_type = other DNA
ccctttgctcgaggcaccca

SEQ ID NO: 154682 - DNA, 20 bp, synthetic construct
  source 1..20: mol_type = other DNA
cccctttgctcgaggcaccc

SEQ ID NO: 154683 - DNA, 20 bp, synthetic construct
  source 1..20: mol_type = other DNA
gcccctttgctcgaggcacc

SEQ ID NO: 154684 - DNA, 20 bp, synthetic construct
  source 1..20: mol_type = other DNA
agcccctttgctcgaggcac

SEQ ID NO: 154685 - DNA, 20 bp, synthetic construct
  source 1..20: mol_type = other DNA
cagcccctttgctcgaggca

SEQ ID NO: 154686 - DNA, 20 bp, synthetic construct
  source 1..20: mol_type = other DNA
gcagcccctttgctcgaggc

SEQ ID NO: 154687 - DNA, 20 bp, synthetic construct
  source 1..20: mol_type = other DNA
tgcagcccctttgctcgagg

SEQ ID NO: 154688 - DNA, 20 bp, synthetic construct
  source 1..20: mol_type = other DNA
atgcagcccctttgctcgag

SEQ ID NO: 154689 - DNA, 20 bp, synthetic construct
  source 1..20: mol_type = other DNA
aatgcagcccctttgctcga

SEQ ID NO: 154690 - DNA, 20 bp, synthetic construct
  source 1..20: mol_type = other DNA
aaatgcagcccctttgctcg

SEQ ID NO: 154691 - DNA, 20 bp, synthetic construct
  source 1..20: mol_type = other DNA
taaatgcagcccctttgctc

SEQ ID NO: 154692 - DNA, 20 bp, synthetic construct
  source 1..20: mol_type = other DNA
ataaatgcagcccctttgct

SEQ ID NO: 154693 - DNA, 20 bp, synthetic construct
  source 1..20: mol_type = other DNA
aataaatgcagcccctttgc

SEQ ID NO: 154694 - DNA, 20 bp, synthetic construct
  source 1..20: mol_type = other DNA
aaataaatgcagcccctttg

SEQ ID NO: 154695 - DNA, 20 bp, synthetic construct
  source 1..20: mol_type = other DNA
caaataaatgcagccccttt

SEQ ID NO: 154696 - DNA, 20 bp, synthetic construct
  source 1..20: mol_type = other DNA
gcaaataaatgcagcccctt

SEQ ID NO: 154697 - DNA, 20 bp, synthetic construct
  source 1..20: mol_type = other DNA
tgcaaataaatgcagcccct

SEQ ID NO: 154698 - DNA, 20 bp, synthetic construct
  source 1..20: mol_type = other DNA
atgcaaataaatgcagcccc

SEQ ID NO: 154699 - DNA, 20 bp, synthetic construct
  source 1..20: mol_type = other DNA
tatgcaaataaatgcagccc

SEQ ID NO: 154700 - DNA, 20 bp, synthetic construct
  source 1..20: mol_type = other DNA
ttatgcaaataaatgcagcc

SEQ ID NO: 154701 - DNA, 20 bp, synthetic construct
  source 1..20: mol_type = other DNA
attatgcaaataaatgcagc

SEQ ID NO: 154702 - DNA, 20 bp, synthetic construct
  source 1..20: mol_type = other DNA
cattatgcaaataaatgcag

SEQ ID NO: 154703 - DNA, 20 bp, synthetic construct
  source 1..20: mol_type = other DNA
gcattatgcaaataaatgca

SEQ ID NO: 154704 - DNA, 20 bp, synthetic construct
  source 1..20: mol_type = other DNA
ggcattatgcaaataaatgc

SEQ ID NO: 154705 - DNA, 20 bp, synthetic construct
  source 1..20: mol_type = other DNA
tggcattatgcaaataaatg

SEQ ID NO: 154706 - DNA, 20 bp, synthetic construct
  source 1..20: mol_type = other DNA
atggcattatgcaaataaat

SEQ ID NO: 154707 - DNA, 20 bp, synthetic construct
  source 1..20: mol_type = other DNA
catggcattatgcaaataaa

SEQ ID NO: 154708 - DNA, 20 bp, synthetic construct
  source 1..20: mol_type = other DNA
acatggcattatgcaaataa

SEQ ID NO: 154709 - DNA, 20 bp, synthetic construct
  source 1..20: mol_type = other DNA
tacatggcattatgcaaata

SEQ ID NO: 154710 - DNA, 20 bp, synthetic construct
  source 1..20: mol_type = other DNA
ttacatggcattatgcaaat

SEQ ID NO: 154711 - DNA, 20 bp, synthetic construct
  source 1..20: mol_type = other DNA
cttacatggcattatgcaaa

SEQ ID NO: 154712 - DNA, 20 bp, synthetic construct
  source 1..20: mol_type = other DNA
tcttacatggcattatgcaa

SEQ ID NO: 154713 - DNA, 20 bp, synthetic construct
  source 1..20: mol_type = other DNA
ctcttacatggcattatgca

SEQ ID NO: 154714 - DNA, 20 bp, synthetic construct
  source 1..20: mol_type = other DNA
actcttacatggcattatgc

SEQ ID NO: 154715 - DNA, 20 bp, synthetic construct
  source 1..20: mol_type = other DNA
tactcttacatggcattatg

SEQ ID NO: 154716 - DNA, 20 bp, synthetic construct
  source 1..20: mol_type = other DNA
ctactcttacatggcattat

SEQ ID NO: 154717 - DNA, 20 bp, synthetic construct
  source 1..20: mol_type = other DNA
gctactcttacatggcatta

SEQ ID NO: 154718 - DNA, 20 bp, synthetic construct
  source 1..20: mol_type = other DNA
agctactcttacatggcatt

SEQ ID NO: 154719 - DNA, 20 bp, synthetic construct
  source 1..20: mol_type = other DNA
gagctactcttacatggcat

SEQ ID NO: 154720 - DNA, 20 bp, synthetic construct
  source 1..20: mol_type = other DNA
agagctactcttacatggca

SEQ ID NO: 154721 - DNA, 20 bp, synthetic construct
  source 1..20: mol_type = other DNA
tagagctactcttacatggc

SEQ ID NO: 154722 - DNA, 20 bp, synthetic construct
  source 1..20: mol_type = other DNA
gtagagctactcttacatgg

SEQ ID NO: 154723 - DNA, 20 bp, synthetic construct
  source 1..20: mol_type = other DNA
tgtagagctactcttacatg

SEQ ID NO: 154724 - DNA, 20 bp, synthetic construct
  source 1..20: mol_type = other DNA
gtgtagagctactcttacat

SEQ ID NO: 154725 - DNA, 20 bp, synthetic construct
  source 1..20: mol_type = other DNA
ggtgtagagctactcttaca

SEQ ID NO: 154726 - DNA, 20 bp, synthetic construct
  source 1..20: mol_type = other DNA
gggtgtagagctactcttac

SEQ ID NO: 154727 - DNA, 20 bp, synthetic construct
  source 1..20: mol_type = other DNA
ggggtgtagagctactctta

SEQ ID NO: 154728 - DNA, 20 bp, synthetic construct
  source 1..20: mol_type = other DNA
tggggtgtagagctactctt

SEQ ID NO: 154729 - DNA, 20 bp, synthetic construct
  source 1..20: mol_type = other DNA
ttggggtgtagagctactct

SEQ ID NO: 154730 - DNA, 20 bp, synthetic construct
  source 1..20: mol_type = other DNA
tttggggtgtagagctactc

SEQ ID NO: 154731 - DNA, 20 bp, synthetic construct
  source 1..20: mol_type = other DNA
gtttggggtgtagagctact

SEQ ID NO: 154732 - DNA, 20 bp, synthetic construct
  source 1..20: mol_type = other DNA
tgtttggggtgtagagctac

SEQ ID NO: 154733 - DNA, 20 bp, synthetic construct
  source 1..20: mol_type = other DNA
gtgtttggggtgtagagcta

SEQ ID NO: 154734 - DNA, 20 bp, synthetic construct
  source 1..20: mol_type = other DNA
tgtgtttggggtgtagagct

SEQ ID NO: 154735 - DNA, 20 bp, synthetic construct
  source 1..20: mol_type = other DNA
ctgtgtttggggtgtagagc

SEQ ID NO: 154736 - DNA, 20 bp, synthetic construct
  source 1..20: mol_type = other DNA
cctgtgtttggggtgtagag

SEQ ID NO: 154737 - DNA, 20 bp, synthetic construct
  source 1..20: mol_type = other DNA
gcctgtgtttggggtgtaga

SEQ ID NO: 154738 - DNA, 20 bp, synthetic construct
  source 1..20: mol_type = other DNA
agcctgtgtttggggtgtag

SEQ ID NO: 154739 - DNA, 20 bp, synthetic construct
  source 1..20: mol_type = other DNA
aagcctgtgtttggggtgta

SEQ ID NO: 154740 - DNA, 20 bp, synthetic construct
  source 1..20: mol_type = other DNA
gaagcctgtgtttggggtgt

SEQ ID NO: 154741 - DNA, 20 bp, synthetic construct
  source 1..20: mol_type = other DNA
agaagcctgtgtttggggtg

SEQ ID NO: 154742 - DNA, 20 bp, synthetic construct
  source 1..20: mol_type = other DNA
aagaagcctgtgtttggggt

SEQ ID NO: 154743 - DNA, 20 bp, synthetic construct
  source 1..20: mol_type = other DNA
taagaagcctgtgtttgggg

SEQ ID NO: 154744 - DNA, 20 bp, synthetic construct
  source 1..20: mol_type = other DNA
ctaagaagcctgtgtttggg

SEQ ID NO: 154745 - DNA, 20 bp, synthetic construct
  source 1..20: mol_type = other DNA
actaagaagcctgtgtttgg

SEQ ID NO: 154746 - DNA, 20 bp, synthetic construct
  source 1..20: mol_type = other DNA
cactaagaagcctgtgtttg

SEQ ID NO: 154747 - DNA, 20 bp, synthetic construct
  source 1..20: mol_type = other DNA
ccactaagaagcctgtgttt

SEQ ID NO: 154748 - DNA, 20 bp, synthetic construct
  source 1..20: mol_type = other DNA
cccactaagaagcctgtgtt

SEQ ID NO: 154749 - DNA, 20 bp, synthetic construct
  source 1..20: mol_type = other DNA
tcccactaagaagcctgtgt

SEQ ID NO: 154750 - DNA, 20 bp, synthetic construct
  source 1..20: mol_type = other DNA
gtcccactaagaagcctgtg

SEQ ID NO: 154751 - DNA, 20 bp, synthetic construct
  source 1..20: mol_type = other DNA
ggtcccactaagaagcctgt

SEQ ID NO: 154752 - DNA, 20 bp, synthetic construct
  source 1..20: mol_type = other DNA
tggtcccactaagaagcctg

SEQ ID NO: 154753 - DNA, 20 bp, synthetic construct
  source 1..20: mol_type = other DNA
ttggtcccactaagaagcct

SEQ ID NO: 154754 - DNA, 20 bp, synthetic construct
  source 1..20: mol_type = other DNA
tttggtcccactaagaagcc

SEQ ID NO: 154755 - DNA, 20 bp, synthetic construct
  source 1..20: mol_type = other DNA
ctttggtcccactaagaagc

SEQ ID NO: 154756 - DNA, 20 bp, synthetic construct
  source 1..20: mol_type = other DNA
actttggtcccactaagaag

SEQ ID NO: 154757 - DNA, 20 bp, synthetic construct
  source 1..20: mol_type = other DNA
tactttggtcccactaagaa

SEQ ID NO: 154758 - DNA, 20 bp, synthetic construct
  source 1..20: mol_type = other DNA
atactttggtcccactaaga

SEQ ID NO: 154759 - DNA, 20 bp, synthetic construct
  source 1..20: mol_type = other DNA
catactttggtcccactaag

SEQ ID NO: 154760 - DNA, 20 bp, synthetic construct
  source 1..20: mol_type = other DNA
tcatactttggtcccactaa

SEQ ID NO: 154761 - DNA, 20 bp, synthetic construct
  source 1..20: mol_type = other DNA
atcatactttggtcccacta

SEQ ID NO: 154762 - DNA, 20 bp, synthetic construct
  source 1..20: mol_type = other DNA
tatcatactttggtcccact

SEQ ID NO: 154763 - DNA, 20 bp, synthetic construct
  source 1..20: mol_type = other DNA
gtatcatactttggtcccac

SEQ ID NO: 154764 - DNA, 20 bp, synthetic construct
  source 1..20: mol_type = other DNA
tgtatcatactttggtccca

SEQ ID NO: 154765 - DNA, 20 bp, synthetic construct
  source 1..20: mol_type = other DNA
ttgtatcatactttggtccc

SEQ ID NO: 154766 - DNA, 20 bp, synthetic construct
  source 1..20: mol_type = other DNA
tttgtatcatactttggtcc

SEQ ID NO: 154767 - DNA, 20 bp, synthetic construct
  source 1..20: mol_type = other DNA
gtttgtatcatactttggtc

SEQ ID NO: 154768 - DNA, 20 bp, synthetic construct
  source 1..20: mol_type = other DNA
agtttgtatcatactttggt

SEQ ID NO: 154769 - DNA, 20 bp, synthetic construct
  source 1..20: mol_type = other DNA
cagtttgtatcatactttgg

SEQ ID NO: 154770 - DNA, 20 bp, synthetic construct
  source 1..20: mol_type = other DNA
tcagtttgtatcatactttg

SEQ ID NO: 154771 - DNA, 20 bp, synthetic construct
  source 1..20: mol_type = other DNA
ttcagtttgtatcatacttt

SEQ ID NO: 154772 - DNA, 20 bp, synthetic construct
  source 1..20: mol_type = other DNA
cttcagtttgtatcatactt

SEQ ID NO: 154773 - DNA, 20 bp, synthetic construct
  source 1..20: mol_type = other DNA
tcttcagtttgtatcatact

SEQ ID NO: 154774 - DNA, 20 bp, synthetic construct
  source 1..20: mol_type = other DNA
atcttcagtttgtatcatac

SEQ ID NO: 154775 - DNA, 20 bp, synthetic construct
  source 1..20: mol_type = other DNA
catcttcagtttgtatcata

SEQ ID NO: 154776 - DNA, 20 bp, synthetic construct
  source 1..20: mol_type = other DNA
ccatcttcagtttgtatcat

SEQ ID NO: 154777 - DNA, 20 bp, synthetic construct
  source 1..20: mol_type = other DNA
tccatcttcagtttgtatca

SEQ ID NO: 154778 - DNA, 20 bp, synthetic construct
  source 1..20: mol_type = other DNA
ttccatcttcagtttgtatc

SEQ ID NO: 154779 - DNA, 20 bp, synthetic construct
  source 1..20: mol_type = other DNA
attccatcttcagtttgtat

SEQ ID NO: 154780 - DNA, 20 bp, synthetic construct
  source 1..20: mol_type = other DNA
cattccatcttcagtttgta

SEQ ID NO: 154781 - DNA, 20 bp, synthetic construct
  source 1..20: mol_type = other DNA
gcattccatcttcagtttgt

SEQ ID NO: 154782 - DNA, 20 bp, synthetic construct
  source 1..20: mol_type = other DNA
tgcattccatcttcagtttg

SEQ ID NO: 154783 - DNA, 20 bp, synthetic construct
  source 1..20: mol_type = other DNA
ctgcattccatcttcagttt

SEQ ID NO: 154784 - DNA, 20 bp, synthetic construct
  source 1..20: mol_type = other DNA
tctgcattccatcttcagtt

SEQ ID NO: 154785 - DNA, 20 bp, synthetic construct
  source 1..20: mol_type = other DNA
ctctgcattccatcttcagt

SEQ ID NO: 154786 - DNA, 20 bp, synthetic construct
  source 1..20: mol_type = other DNA
cctctgcattccatcttcag

SEQ ID NO: 154787 - DNA, 20 bp, synthetic construct
  source 1..20: mol_type = other DNA
tcctctgcattccatcttca

SEQ ID NO: 154788 - DNA, 20 bp, synthetic construct
  source 1..20: mol_type = other DNA
atcctctgcattccatcttc

SEQ ID NO: 154789 - DNA, 20 bp, synthetic construct
  source 1..20: mol_type = other DNA
aatcctctgcattccatctt

SEQ ID NO: 154790 - DNA, 20 bp, synthetic construct
  source 1..20: mol_type = other DNA
taatcctctgcattccatct

SEQ ID NO: 154791 - DNA, 20 bp, synthetic construct
  source 1..20: mol_type = other DNA
ataatcctctgcattccatc

SEQ ID NO: 154792 - DNA, 20 bp, synthetic construct
  source 1..20: mol_type = other DNA
aataatcctctgcattccat

SEQ ID NO: 154793 - DNA, 20 bp, synthetic construct
  source 1..20: mol_type = other DNA
caataatcctctgcattcca

SEQ ID NO: 154794 - DNA, 20 bp, synthetic construct
  source 1..20: mol_type = other DNA
ccaataatcctctgcattcc

SEQ ID NO: 154795 - DNA, 20 bp, synthetic construct
  source 1..20: mol_type = other DNA
accaataatcctctgcattc

SEQ ID NO: 154796 - DNA, 20 bp, synthetic construct
  source 1..20: mol_type = other DNA
taccaataatcctctgcatt

SEQ ID NO: 154797 - DNA, 20 bp, synthetic construct
  source 1..20: mol_type = other DNA
gtaccaataatcctctgcat

SEQ ID NO: 154798 - DNA, 20 bp, synthetic construct
  source 1..20: mol_type = other DNA
agtaccaataatcctctgca

SEQ ID NO: 154799 - DNA, 20 bp, synthetic construct
  source 1..20: mol_type = other DNA
aagtaccaataatcctctgc

SEQ ID NO: 154800 - DNA, 20 bp, synthetic construct
  source 1..20: mol_type = other DNA
aaagtaccaataatcctctg

SEQ ID NO: 154801 - DNA, 20 bp, synthetic construct
  source 1..20: mol_type = other DNA
caaagtaccaataatcctct

SEQ ID NO: 154802 - DNA, 20 bp, synthetic construct
  source 1..20: mol_type = other DNA
ccaaagtaccaataatcctc

SEQ ID NO: 154803 - DNA, 20 bp, synthetic construct
  source 1..20: mol_type = other DNA
tccaaagtaccaataatcct

SEQ ID NO: 154804 - DNA, 20 bp, synthetic construct
  source 1..20: mol_type = other DNA
ttccaaagtaccaataatcc

SEQ ID NO: 154805 - DNA, 20 bp, synthetic construct
  source 1..20: mol_type = other DNA
attccaaagtaccaataatc

SEQ ID NO: 154806 - DNA, 20 bp, synthetic construct
  source 1..20: mol_type = other DNA
tattccaaagtaccaataat

SEQ ID NO: 154807 - DNA, 20 bp, synthetic construct
  source 1..20: mol_type = other DNA
atattccaaagtaccaataa

SEQ ID NO: 154808 - DNA, 20 bp, synthetic construct
  source 1..20: mol_type = other DNA
catattccaaagtaccaata

SEQ ID NO: 154809 - DNA, 20 bp, synthetic construct
  source 1..20: mol_type = other DNA
gcatattccaaagtaccaat

SEQ ID NO: 154810 - DNA, 20 bp, synthetic construct
  source 1..20: mol_type = other DNA
agcatattccaaagtaccaa

SEQ ID NO: 154811 - DNA, 20 bp, synthetic construct
  source 1..20: mol_type = other DNA
aagcatattccaaagtacca

SEQ ID NO: 154812 - DNA, 20 bp, synthetic construct
  source 1..20: mol_type = other DNA
taagcatattccaaagtacc

SEQ ID NO: 154813 - DNA, 20 bp, synthetic construct
  source 1..20: mol_type = other DNA
ttaagcatattccaaagtac

SEQ ID NO: 154814 - DNA, 20 bp, synthetic construct
  source 1..20: mol_type = other DNA
tttaagcatattccaaagta

SEQ ID NO: 154815 - DNA, 20 bp, synthetic construct
  source 1..20: mol_type = other DNA
ttttaagcatattccaaagt

SEQ ID NO: 154816 - DNA, 20 bp, synthetic construct
  source 1..20: mol_type = other DNA
tttttaagcatattccaaag

SEQ ID NO: 154817 - DNA, 20 bp, synthetic construct
  source 1..20: mol_type = other DNA
ttttttaagcatattccaaa

SEQ ID NO: 154818 - DNA, 20 bp, synthetic construct
  source 1..20: mol_type = other DNA
tttttttaagcatattccaa

SEQ ID NO: 154819 - DNA, 20 bp, synthetic construct
  source 1..20: mol_type = other DNA
ttttttttaagcatattcca

SEQ ID NO: 154820 - DNA, 20 bp, synthetic construct
  source 1..20: mol_type = other DNA
attttttttaagcatattcc

SEQ ID NO: 154821 - DNA, 20 bp, synthetic construct
  source 1..20: mol_type = other DNA
aattttttttaagcatattc

SEQ ID NO: 154822 - DNA, 20 bp, synthetic construct
  source 1..20: mol_type = other DNA
aaattttttttaagcatatt

SEQ ID NO: 154823 - DNA, 20 bp, synthetic construct
  source 1..20: mol_type = other DNA
aaaattttttttaagcatat

SEQ ID NO: 154824 - DNA, 20 bp, synthetic construct
  source 1..20: mol_type = other DNA
aaaaattttttttaagcata

SEQ ID NO: 154825 - DNA, 20 bp, synthetic construct
  source 1..20: mol_type = other DNA
aaaaaattttttttaagcat

SEQ ID NO: 154826 - DNA, 20 bp, synthetic construct
  source 1..20: mol_type = other DNA
aaaaaaattttttttaagca

SEQ ID NO: 154827 - DNA, 20 bp, synthetic construct
  source 1..20: mol_type = other DNA
taaaaaaattttttttaagc

SEQ ID NO: 154828 - DNA, 20 bp, synthetic construct
  source 1..20: mol_type = other DNA
ttaaaaaaattttttttaag

SEQ ID NO: 154829 - DNA, 20 bp, synthetic construct
  source 1..20: mol_type = other DNA
tttaaaaaaattttttttaa

SEQ ID NO: 154830 - DNA, 20 bp, synthetic construct
  source 1..20: mol_type = other DNA
ctttaaaaaaatttttttta

SEQ ID NO: 154831 - DNA, 20 bp, synthetic construct
  source 1..20: mol_type = other DNA
actttaaaaaaatttttttt

SEQ ID NO: 154832 - DNA, 20 bp, synthetic construct
  source 1..20: mol_type = other DNA
tactttaaaaaaattttttt

SEQ ID NO: 154833 - DNA, 20 bp, synthetic construct
  source 1..20: mol_type = other DNA
atactttaaaaaaatttttt

SEQ ID NO: 154834 - DNA, 20 bp, synthetic construct
  source 1..20: mol_type = other DNA
aatactttaaaaaaattttt

SEQ ID NO: 154835 - DNA, 20 bp, synthetic construct
  source 1..20: mol_type = other DNA
aaatactttaaaaaaatttt

SEQ ID NO: 154836 - DNA, 20 bp, synthetic construct
  source 1..20: mol_type = other DNA
aaaatactttaaaaaaattt

SEQ ID NO: 154837 - DNA, 20 bp, synthetic construct
  source 1..20: mol_type = other DNA
aaaaatactttaaaaaaatt

SEQ ID NO: 154838 - DNA, 20 bp, synthetic construct
  source 1..20: mol_type = other DNA
taaaaatactttaaaaaaat

SEQ ID NO: 154839 - DNA, 20 bp, synthetic construct
  source 1..20: mol_type = other DNA
ttaaaaatactttaaaaaaa

SEQ ID NO: 154840 - DNA, 20 bp, synthetic construct
  source 1..20: mol_type = other DNA
tttaaaaatactttaaaaaa

SEQ ID NO: 154841 - DNA, 20 bp, synthetic construct
  source 1..20: mol_type = other DNA
ttttaaaaatactttaaaaa

SEQ ID NO: 154842 - DNA, 20 bp, synthetic construct
  source 1..20: mol_type = other DNA
tttttaaaaatactttaaaa

SEQ ID NO: 154843 - DNA, 20 bp, synthetic construct
  source 1..20: mol_type = other DNA
ttttttaaaaatactttaaa

SEQ ID NO: 154844 - DNA, 20 bp, synthetic construct
  source 1..20: mol_type = other DNA
attttttaaaaatactttaa

SEQ ID NO: 154845 - DNA, 20 bp, synthetic construct
  source 1..20: mol_type = other DNA
gattttttaaaaatacttta

SEQ ID NO: 154846 - DNA, 20 bp, synthetic construct
  source 1..20: mol_type = other DNA
tgattttttaaaaatacttt

SEQ ID NO: 154847 - DNA, 20 bp, synthetic construct
  source 1..20: mol_type = other DNA
ctgattttttaaaaatactt

SEQ ID NO: 154848 - DNA, 20 bp, synthetic construct
  source 1..20: mol_type = other DNA
cctgattttttaaaaatact

SEQ ID NO: 154849 - DNA, 20 bp, synthetic construct
  source 1..20: mol_type = other DNA
gcctgattttttaaaaatac

SEQ ID NO: 154850 - DNA, 20 bp, synthetic construct
  source 1..20: mol_type = other DNA
tgcctgattttttaaaaata

SEQ ID NO: 154851 - DNA, 20 bp, synthetic construct
  source 1..20: mol_type = other DNA
ttgcctgattttttaaaaat

SEQ ID NO: 154852 - DNA, 20 bp, synthetic construct
  source 1..20: mol_type = other DNA
gttgcctgattttttaaaaa

SEQ ID NO: 154853 - DNA, 20 bp, synthetic construct
  source 1..20: mol_type = other DNA
ggttgcctgattttttaaaa

SEQ ID NO: 154854 - DNA, 20 bp, synthetic construct
  source 1..20: mol_type = other DNA
gggttgcctgattttttaaa

SEQ ID NO: 154855 - DNA, 20 bp, synthetic construct
  source 1..20: mol_type = other DNA
ggggttgcctgattttttaa

SEQ ID NO: 154856 - DNA, 20 bp, synthetic construct
  source 1..20: mol_type = other DNA
aggggttgcctgatttttta

SEQ ID NO: 154857 - DNA, 20 bp, synthetic construct
  source 1..20: mol_type = other DNA
caggggttgcctgatttttt

SEQ ID NO: 154858 - DNA, 20 bp, synthetic construct
  source 1..20: mol_type = other DNA
tcaggggttgcctgattttt

SEQ ID NO: 154859 - DNA, 20 bp, synthetic construct
  source 1..20: mol_type = other DNA
ttcaggggttgcctgatttt

SEQ ID NO: 154860 - DNA, 20 bp, synthetic construct
  source 1..20: mol_type = other DNA
gttcaggggttgcctgattt

SEQ ID NO: 154861 - DNA, 20 bp, synthetic construct
  source 1..20: mol_type = other DNA
ggttcaggggttgcctgatt

SEQ ID NO: 154862 - DNA, 20 bp, synthetic construct
  source 1..20: mol_type = other DNA
tggttcaggggttgcctgat

SEQ ID NO: 154863 - DNA, 20 bp, synthetic construct
  source 1..20: mol_type = other DNA
ctggttcaggggttgcctga

SEQ ID NO: 154864 - DNA, 20 bp, synthetic construct
  source 1..20: mol_type = other DNA
tctggttcaggggttgcctg

SEQ ID NO: 154865 - DNA, 20 bp, synthetic construct
  source 1..20: mol_type = other DNA
ctctggttcaggggttgcct

SEQ ID NO: 154866 - DNA, 20 bp, synthetic construct
  source 1..20: mol_type = other DNA
actctggttcaggggttgcc

SEQ ID NO: 154867 - DNA, 20 bp, synthetic construct
  source 1..20: mol_type = other DNA
tactctggttcaggggttgc

SEQ ID NO: 154868 - DNA, 20 bp, synthetic construct
  source 1..20: mol_type = other DNA
ctactctggttcaggggttg

SEQ ID NO: 154869 - DNA, 20 bp, synthetic construct
  source 1..20: mol_type = other DNA
cctactctggttcaggggtt

SEQ ID NO: 154870 - DNA, 20 bp, synthetic construct
  source 1..20: mol_type = other DNA
acctactctggttcaggggt

SEQ ID NO: 154871 - DNA, 20 bp, synthetic construct
  source 1..20: mol_type = other DNA
aacctactctggttcagggg

SEQ ID NO: 154872 - DNA, 20 bp, synthetic construct
  source 1..20: mol_type = other DNA
gaacctactctggttcaggg

SEQ ID NO: 154873 - DNA, 20 bp, synthetic construct
  source 1..20: mol_type = other DNA
tgaacctactctggttcagg

SEQ ID NO: 154874 - DNA, 20 bp, synthetic construct
  source 1..20: mol_type = other DNA
ctgaacctactctggttcag

SEQ ID NO: 154875 - DNA, 20 bp, synthetic construct
  source 1..20: mol_type = other DNA
tctgaacctactctggttca

SEQ ID NO: 154876 - DNA, 20 bp, synthetic construct
  source 1..20: mol_type = other DNA
ctctgaacctactctggttc

SEQ ID NO: 154877 - DNA, 20 bp, synthetic construct
  source 1..20: mol_type = other DNA
tctctgaacctactctggtt

SEQ ID NO: 154878 - DNA, 20 bp, synthetic construct
  source 1..20: mol_type = other DNA
ttctctgaacctactctggt

SEQ ID NO: 154879 - DNA, 20 bp, synthetic construct
  source 1..20: mol_type = other DNA
tttctctgaacctactctgg

SEQ ID NO: 154880 - DNA, 20 bp, synthetic construct
  source 1..20: mol_type = other DNA
gtttctctgaacctactctg

SEQ ID NO: 154881 - DNA, 20 bp, synthetic construct
  source 1..20: mol_type = other DNA
agtttctctgaacctactct

SEQ ID NO: 154882 - DNA, 20 bp, synthetic construct
  source 1..20: mol_type = other DNA
cagtttctctgaacctactc

SEQ ID NO: 154883 - DNA, 20 bp, synthetic construct
  source 1..20: mol_type = other DNA
gcagtttctctgaacctact

SEQ ID NO: 154884 - DNA, 20 bp, synthetic construct
  source 1..20: mol_type = other DNA
ggcagtttctctgaacctac

SEQ ID NO: 154885 - DNA, 20 bp, synthetic construct
  source 1..20: mol_type = other DNA
tggcagtttctctgaaccta

SEQ ID NO: 154886 - DNA, 20 bp, synthetic construct
  source 1..20: mol_type = other DNA
ttggcagtttctctgaacct

SEQ ID NO: 154887 - DNA, 20 bp, synthetic construct
  source 1..20: mol_type = other DNA
tttggcagtttctctgaacc

SEQ ID NO: 154888 - DNA, 20 bp, synthetic construct
  source 1..20: mol_type = other DNA
atttggcagtttctctgaac

SEQ ID NO: 154889 - DNA, 20 bp, synthetic construct
  source 1..20: mol_type = other DNA
aatttggcagtttctctgaa

SEQ ID NO: 154890 - DNA, 20 bp, synthetic construct
  source 1..20: mol_type = other DNA
aaatttggcagtttctctga

SEQ ID NO: 154891 - DNA, 20 bp, synthetic construct
  source 1..20: mol_type = other DNA
aaaatttggcagtttctctg

SEQ ID NO: 154892 - DNA, 20 bp, synthetic construct
  source 1..20: mol_type = other DNA
taaaatttggcagtttctct

SEQ ID NO: 154893 - DNA, 20 bp, synthetic construct
  source 1..20: mol_type = other DNA
ataaaatttggcagtttctc

SEQ ID NO: 154894 - DNA, 20 bp, synthetic construct
  source 1..20: mol_type = other DNA
aataaaatttggcagtttct

SEQ ID NO: 154895 - DNA, 20 bp, synthetic construct
  source 1..20: mol_type = other DNA
aaataaaatttggcagtttc

SEQ ID NO: 154896 - DNA, 20 bp, synthetic construct
  source 1..20: mol_type = other DNA
aaaataaaatttggcagttt

SEQ ID NO: 154897 - DNA, 20 bp, synthetic construct
  source 1..20: mol_type = other DNA
gaaaataaaatttggcagtt

SEQ ID NO: 154898 - DNA, 20 bp, synthetic construct
  source 1..20: mol_type = other DNA
agaaaataaaatttggcagt

SEQ ID NO: 154899 - DNA, 20 bp, synthetic construct
  source 1..20: mol_type = other DNA
aagaaaataaaatttggcag

SEQ ID NO: 154900 - DNA, 20 bp, synthetic construct
  source 1..20: mol_type = other DNA
taagaaaataaaatttggca

SEQ ID NO: 154901 - DNA, 20 bp, synthetic construct
  source 1..20: mol_type = other DNA
ttaagaaaataaaatttggc

SEQ ID NO: 154902 - DNA, 20 bp, synthetic construct
  source 1..20: mol_type = other DNA
attaagaaaataaaatttgg

SEQ ID NO: 154903 - DNA, 20 bp, synthetic construct
  source 1..20: mol_type = other DNA
aattaagaaaataaaatttg

SEQ ID NO: 154904 - DNA, 20 bp, synthetic construct
  source 1..20: mol_type = other DNA
aaattaagaaaataaaattt

SEQ ID NO: 154905 - DNA, 20 bp, synthetic construct
  source 1..20: mol_type = other DNA
caaattaagaaaataaaatt

SEQ ID NO: 154906 - DNA, 20 bp, synthetic construct
  source 1..20: mol_type = other DNA
ccaaattaagaaaataaaat

SEQ ID NO: 154907 - DNA, 20 bp, synthetic construct
  source 1..20: mol_type = other DNA
cccaaattaagaaaataaaa

SEQ ID NO: 154908 - DNA, 20 bp, synthetic construct
  source 1..20: mol_type = other DNA
tcccaaattaagaaaataaa

SEQ ID NO: 154909 - DNA, 20 bp, synthetic construct
  source 1..20: mol_type = other DNA
atcccaaattaagaaaataa

SEQ ID NO: 154910 - DNA, 20 bp, synthetic construct
  source 1..20: mol_type = other DNA
aatcccaaattaagaaaata

SEQ ID NO: 154911 - DNA, 20 bp, synthetic construct
  source 1..20: mol_type = other DNA
caatcccaaattaagaaaat

SEQ ID NO: 154912 - DNA, 20 bp, synthetic construct
  source 1..20: mol_type = other DNA
ccaatcccaaattaagaaaa

SEQ ID NO: 154913 - DNA, 20 bp, synthetic construct
  source 1..20: mol_type = other DNA
tccaatcccaaattaagaaa

SEQ ID NO: 154914 - DNA, 20 bp, synthetic construct
  source 1..20: mol_type = other DNA
ttccaatcccaaattaagaa

SEQ ID NO: 154915 - DNA, 20 bp, synthetic construct
  source 1..20: mol_type = other DNA
cttccaatcccaaattaaga

SEQ ID NO: 154916 - DNA, 20 bp, synthetic construct
  source 1..20: mol_type = other DNA
gcttccaatcccaaattaag

SEQ ID NO: 154917 - DNA, 20 bp, synthetic construct
  source 1..20: mol_type = other DNA
tgcttccaatcccaaattaa

SEQ ID NO: 154918 - DNA, 20 bp, synthetic construct
  source 1..20: mol_type = other DNA
ttgcttccaatcccaaatta

SEQ ID NO: 154919 - DNA, 20 bp, synthetic construct
  source 1..20: mol_type = other DNA
cttgcttccaatcccaaatt

SEQ ID NO: 154920 - DNA, 20 bp, synthetic construct
  source 1..20: mol_type = other DNA
acttgcttccaatcccaaat

SEQ ID NO: 154921 - DNA, 20 bp, synthetic construct
  source 1..20: mol_type = other DNA
aacttgcttccaatcccaaa

SEQ ID NO: 154922 - DNA, 20 bp, synthetic construct
  source 1..20: mol_type = other DNA
taacttgcttccaatcccaa

SEQ ID NO: 154923 - DNA, 20 bp, synthetic construct
  source 1..20: mol_type = other DNA
ttaacttgcttccaatccca

SEQ ID NO: 154924 - DNA, 20 bp, synthetic construct
  source 1..20: mol_type = other DNA
gttaacttgcttccaatccc

SEQ ID NO: 154925 - DNA, 20 bp, synthetic construct
  source 1..20: mol_type = other DNA
tgttaacttgcttccaatcc

SEQ ID NO: 154926 - DNA, 20 bp, synthetic construct
  source 1..20: mol_type = other DNA
ctgttaacttgcttccaatc

SEQ ID NO: 154927 - DNA, 20 bp, synthetic construct
  source 1..20: mol_type = other DNA
tctgttaacttgcttccaat

SEQ ID NO: 154928 - DNA, 20 bp, synthetic construct
  source 1..20: mol_type = other DNA
ttctgttaacttgcttccaa

SEQ ID NO: 154929 - DNA, 20 bp, synthetic construct
  source 1..20: mol_type = other DNA
cttctgttaacttgcttcca

SEQ ID NO: 154930 - DNA, 20 bp, synthetic construct
  source 1..20: mol_type = other DNA
acttctgttaacttgcttcc

SEQ ID NO: 154931 - DNA, 20 bp, synthetic construct
  source 1..20: mol_type = other DNA
aacttctgttaacttgcttc

SEQ ID NO: 154932 - DNA, 20 bp, synthetic construct
  source 1..20: mol_type = other DNA
aaacttctgttaacttgctt

SEQ ID NO: 154933 - DNA, 20 bp, synthetic construct
  source 1..20: mol_type = other DNA
taaacttctgttaacttgct

SEQ ID NO: 154934 - DNA, 20 bp, synthetic construct
  source 1..20: mol_type = other DNA
ataaacttctgttaacttgc

SEQ ID NO: 154935 - DNA, 20 bp, synthetic construct
  source 1..20: mol_type = other DNA
cataaacttctgttaacttg

SEQ ID NO: 154936 - DNA, 20 bp, synthetic construct
  source 1..20: mol_type = other DNA
tcataaacttctgttaactt

SEQ ID NO: 154937 - DNA, 20 bp, synthetic construct
  source 1..20: mol_type = other DNA
ctcataaacttctgttaact

SEQ ID NO: 154938 - DNA, 20 bp, synthetic construct
  source 1..20: mol_type = other DNA
actcataaacttctgttaac

SEQ ID NO: 154939 - DNA, 20 bp, synthetic construct
  source 1..20: mol_type = other DNA
aactcataaacttctgttaa

SEQ ID NO: 154940 - DNA, 20 bp, synthetic construct
  source 1..20: mol_type = other DNA
taactcataaacttctgtta

SEQ ID NO: 154941 - DNA, 20 bp, synthetic construct
  source 1..20: mol_type = other DNA
ttaactcataaacttctgtt

SEQ ID NO: 154942 - DNA, 20 bp, synthetic construct
  source 1..20: mol_type = other DNA
cttaactcataaacttctgt

SEQ ID NO: 154943 - DNA, 20 bp, synthetic construct
  source 1..20: mol_type = other DNA
acttaactcataaacttctg

SEQ ID NO: 154944 - DNA, 20 bp, synthetic construct
  source 1..20: mol_type = other DNA
aacttaactcataaacttct

SEQ ID NO: 154945 - DNA, 20 bp, synthetic construct
  source 1..20: mol_type = other DNA
caacttaactcataaacttc

SEQ ID NO: 154946 - DNA, 20 bp, synthetic construct
  source 1..20: mol_type = other DNA
gcaacttaactcataaactt

SEQ ID NO: 154947 - DNA, 20 bp, synthetic construct
  source 1..20: mol_type = other DNA
tgcaacttaactcataaact

SEQ ID NO: 154948 - DNA, 20 bp, synthetic construct
  source 1..20: mol_type = other DNA
atgcaacttaactcataaac

SEQ ID NO: 154949 - DNA, 20 bp, synthetic construct
  source 1..20: mol_type = other DNA
aatgcaacttaactcataaa

SEQ ID NO: 154950 - DNA, 20 bp, synthetic construct
  source 1..20: mol_type = other DNA
aaatgcaacttaactcataa

SEQ ID NO: 154951 - DNA, 20 bp, synthetic construct
  source 1..20: mol_type = other DNA
taaatgcaacttaactcata

SEQ ID NO: 154952 - DNA, 20 bp, synthetic construct
  source 1..20: mol_type = other DNA
ctaaatgcaacttaactcat

SEQ ID NO: 154953 - DNA, 20 bp, synthetic construct
  source 1..20: mol_type = other DNA
actaaatgcaacttaactca

SEQ ID NO: 154954 - DNA, 20 bp, synthetic construct
  source 1..20: mol_type = other DNA
cactaaatgcaacttaactc

SEQ ID NO: 154955 - DNA, 20 bp, synthetic construct
  source 1..20: mol_type = other DNA
tcactaaatgcaacttaact

SEQ ID NO: 154956 - DNA, 20 bp, synthetic construct
  source 1..20: mol_type = other DNA
atcactaaatgcaacttaac

SEQ ID NO: 154957 - DNA, 20 bp, synthetic construct
  source 1..20: mol_type = other DNA
gatcactaaatgcaacttaa

SEQ ID NO: 154958 - DNA, 20 bp, synthetic construct
  source 1..20: mol_type = other DNA
agatcactaaatgcaactta

SEQ ID NO: 154959 - DNA, 20 bp, synthetic construct
  source 1..20: mol_type = other DNA
aagatcactaaatgcaactt

SEQ ID NO: 154960 - DNA, 20 bp, synthetic construct
  source 1..20: mol_type = other DNA
aaagatcactaaatgcaact

SEQ ID NO: 154961 - DNA, 20 bp, synthetic construct
  source 1..20: mol_type = other DNA
aaaagatcactaaatgcaac

SEQ ID NO: 154962 - DNA, 20 bp, synthetic construct
  source 1..20: mol_type = other DNA
caaaagatcactaaatgcaa

SEQ ID NO: 154963 - DNA, 20 bp, synthetic construct
  source 1..20: mol_type = other DNA
gcaaaagatcactaaatgca

SEQ ID NO: 154964 - DNA, 20 bp, synthetic construct
  source 1..20: mol_type = other DNA
ggcaaaagatcactaaatgc

SEQ ID NO: 154965 - DNA, 20 bp, synthetic construct
  source 1..20: mol_type = other DNA
tggcaaaagatcactaaatg

SEQ ID NO: 154966 - DNA, 20 bp, synthetic construct
  source 1..20: mol_type = other DNA
atggcaaaagatcactaaat

SEQ ID NO: 154967 - DNA, 20 bp, synthetic construct
  source 1..20: mol_type = other DNA
tatggcaaaagatcactaaa

SEQ ID NO: 154968 - DNA, 20 bp, synthetic construct
  source 1..20: mol_type = other DNA
atatggcaaaagatcactaa

SEQ ID NO: 154969 - DNA, 20 bp, synthetic construct
  source 1..20: mol_type = other DNA
aatatggcaaaagatcacta

SEQ ID NO: 154970 - DNA, 20 bp, synthetic construct
  source 1..20: mol_type = other DNA
aaatatggcaaaagatcact

SEQ ID NO: 154971 - DNA, 20 bp, synthetic construct
  source 1..20: mol_type = other DNA
caaatatggcaaaagatcac

SEQ ID NO: 154972 - DNA, 20 bp, synthetic construct
  source 1..20: mol_type = other DNA
tcaaatatggcaaaagatca

SEQ ID NO: 154973 - DNA, 20 bp, synthetic construct
  source 1..20: mol_type = other DNA
ctcaaatatggcaaaagatc

SEQ ID NO: 154974 - DNA, 20 bp, synthetic construct
  source 1..20: mol_type = other DNA
actcaaatatggcaaaagat

SEQ ID NO: 154975 - DNA, 20 bp, synthetic construct
  source 1..20: mol_type = other DNA
tactcaaatatggcaaaaga

SEQ ID NO: 154976 - DNA, 20 bp, synthetic construct
  source 1..20: mol_type = other DNA
ttactcaaatatggcaaaag

SEQ ID NO: 154977 - DNA, 20 bp, synthetic construct
  source 1..20: mol_type = other DNA
attactcaaatatggcaaaa

SEQ ID NO: 154978 - DNA, 20 bp, synthetic construct
  source 1..20: mol_type = other DNA
tattactcaaatatggcaaa

SEQ ID NO: 154979 - DNA, 20 bp, synthetic construct
  source 1..20: mol_type = other DNA
ttattactcaaatatggcaa

SEQ ID NO: 154980 - DNA, 20 bp, synthetic construct
  source 1..20: mol_type = other DNA
attattactcaaatatggca

SEQ ID NO: 154981 - DNA, 20 bp, synthetic construct
  source 1..20: mol_type = other DNA
gattattactcaaatatggc

SEQ ID NO: 154982 - DNA, 20 bp, synthetic construct
  source 1..20: mol_type = other DNA
agattattactcaaatatgg

SEQ ID NO: 154983 - DNA, 20 bp, synthetic construct
  source 1..20: mol_type = other DNA
cagattattactcaaatatg

SEQ ID NO: 154984 - DNA, 20 bp, synthetic construct
  source 1..20: mol_type = other DNA
tcagattattactcaaatat

SEQ ID NO: 154985 - DNA, 20 bp, synthetic construct
  source 1..20: mol_type = other DNA
atcagattattactcaaata

SEQ ID NO: 154986 - DNA, 20 bp, synthetic construct
  source 1..20: mol_type = other DNA
aatcagattattactcaaat

SEQ ID NO: 154987 - DNA, 20 bp, synthetic construct
  source 1..20: mol_type = other DNA
aaatcagattattactcaaa

SEQ ID NO: 154988 - DNA, 20 bp, synthetic construct
  source 1..20: mol_type = other DNA
aaaatcagattattactcaa

SEQ ID NO: 154989 - DNA, 20 bp, synthetic construct
  source 1..20: mol_type = other DNA
aaaaatcagattattactca

SEQ ID NO: 154990 - DNA, 20 bp, synthetic construct
  source 1..20: mol_type = other DNA
aaaaaatcagattattactc

SEQ ID NO: 154991 - DNA, 20 bp, synthetic construct
  source 1..20: mol_type = other DNA
aaaaaaatcagattattact

SEQ ID NO: 154992 - DNA, 20 bp, synthetic construct
  source 1..20: mol_type = other DNA
caaaaaaatcagattattac

SEQ ID NO: 154993 - DNA, 20 bp, synthetic construct
  source 1..20: mol_type = other DNA
acaaaaaaatcagattatta

SEQ ID NO: 154994 - DNA, 20 bp, synthetic construct
  source 1..20: mol_type = other DNA
aacaaaaaaatcagattatt

SEQ ID NO: 154995 - DNA, 20 bp, synthetic construct
  source 1..20: mol_type = other DNA
aaacaaaaaaatcagattat

SEQ ID NO: 154996 - DNA, 20 bp, synthetic construct
  source 1..20: mol_type = other DNA
taaacaaaaaaatcagatta

SEQ ID NO: 154997 - DNA, 20 bp, synthetic construct
  source 1..20: mol_type = other DNA
ataaacaaaaaaatcagatt

SEQ ID NO: 154998 - DNA, 20 bp, synthetic construct
  source 1..20: mol_type = other DNA
tataaacaaaaaaatcagat

SEQ ID NO: 154999 - DNA, 20 bp, synthetic construct
  source 1..20: mol_type = other DNA
ctataaacaaaaaaatcaga

SEQ ID NO: 155000 - DNA, 20 bp, synthetic construct
  source 1..20: mol_type = other DNA
tctataaacaaaaaaatcag

SEQ ID NO: 155001 - DNA, 20 bp, synthetic construct
  source 1..20: mol_type = other DNA
atctataaacaaaaaaatca

SEQ ID NO: 155002 - DNA, 20 bp, synthetic construct
  source 1..20: mol_type = other DNA
aatctataaacaaaaaaatc

SEQ ID NO: 155003 - DNA, 20 bp, synthetic construct
  source 1..20: mol_type = other DNA
aaatctataaacaaaaaaat

SEQ ID NO: 155004 - DNA, 20 bp, synthetic construct
  source 1..20: mol_type = other DNA
gaaatctataaacaaaaaaa

SEQ ID NO: 155005 - DNA, 20 bp, synthetic construct
  source 1..20: mol_type = other DNA
agaaatctataaacaaaaaa

SEQ ID NO: 155006 - DNA, 20 bp, synthetic construct
  source 1..20: mol_type = other DNA
aagaaatctataaacaaaaa

SEQ ID NO: 155007 - DNA, 20 bp, synthetic construct
  source 1..20: mol_type = other DNA
gaagaaatctataaacaaaa

SEQ ID NO: 155008 - DNA, 20 bp, synthetic construct
  source 1..20: mol_type = other DNA
agaagaaatctataaacaaa

SEQ ID NO: 155009 - DNA, 20 bp, synthetic construct
  source 1..20: mol_type = other DNA
aagaagaaatctataaacaa

SEQ ID NO: 155010 - DNA, 20 bp, synthetic construct
  source 1..20: mol_type = other DNA
taagaagaaatctataaaca

SEQ ID NO: 155011 - DNA, 20 bp, synthetic construct
  source 1..20: mol_type = other DNA
ttaagaagaaatctataaac

SEQ ID NO: 155012 - DNA, 20 bp, synthetic construct
  source 1..20: mol_type = other DNA
tttaagaagaaatctataaa

SEQ ID NO: 155013 - DNA, 20 bp, synthetic construct
  source 1..20: mol_type = other DNA
atttaagaagaaatctataa

SEQ ID NO: 155014 - DNA, 20 bp, synthetic construct
  source 1..20: mol_type = other DNA
aatttaagaagaaatctata

SEQ ID NO: 155015 - DNA, 20 bp, synthetic construct
  source 1..20: mol_type = other DNA
taatttaagaagaaatctat

SEQ ID NO: 155016 - DNA, 20 bp, synthetic construct
  source 1..20: mol_type = other DNA
ttaatttaagaagaaatcta

SEQ ID NO: 155017 - DNA, 20 bp, synthetic construct
  source 1..20: mol_type = other DNA
gttaatttaagaagaaatct

SEQ ID NO: 155018 - DNA, 20 bp, synthetic construct
  source 1..20: mol_type = other DNA
agttaatttaagaagaaatc

SEQ ID NO: 155019 - DNA, 20 bp, synthetic construct
  source 1..20: mol_type = other DNA
aagttaatttaagaagaaat

SEQ ID NO: 155020 - DNA, 20 bp, synthetic construct
  source 1..20: mol_type = other DNA
aaagttaatttaagaagaaa

SEQ ID NO: 155021 - DNA, 20 bp, synthetic construct
  source 1..20: mol_type = other DNA
taaagttaatttaagaagaa

SEQ ID NO: 155022 - DNA, 20 bp, synthetic construct
  source 1..20: mol_type = other DNA
ataaagttaatttaagaaga

SEQ ID NO: 155023 - DNA, 20 bp, synthetic construct
  source 1..20: mol_type = other DNA
aataaagttaatttaagaag

SEQ ID NO: 155024 - DNA, 20 bp, synthetic construct
  source 1..20: mol_type = other DNA
gaataaagttaatttaagaa

SEQ ID NO: 155025 - DNA, 20 bp, synthetic construct
  source 1..20: mol_type = other DNA
tgaataaagttaatttaaga

SEQ ID NO: 155026 - DNA, 20 bp, synthetic construct
  source 1..20: mol_type = other DNA
atgaataaagttaatttaag

SEQ ID NO: 155027 - DNA, 20 bp, synthetic construct
  source 1..20: mol_type = other DNA
gatgaataaagttaatttaa

SEQ ID NO: 155028 - DNA, 20 bp, synthetic construct
  source 1..20: mol_type = other DNA
agatgaataaagttaattta

SEQ ID NO: 155029 - DNA, 20 bp, synthetic construct
  source 1..20: mol_type = other DNA
aagatgaataaagttaattt

SEQ ID NO: 155030 - DNA, 20 bp, synthetic construct
  source 1..20: mol_type = other DNA
caagatgaataaagttaatt

SEQ ID NO: 155031 - DNA, 20 bp, synthetic construct
  source 1..20: mol_type = other DNA
gcaagatgaataaagttaat

SEQ ID NO: 155032 - DNA, 20 bp, synthetic construct
  source 1..20: mol_type = other DNA
agcaagatgaataaagttaa

SEQ ID NO: 155033 - DNA, 20 bp, synthetic construct
  source 1..20: mol_type = other DNA
tagcaagatgaataaagtta

SEQ ID NO: 155034 - DNA, 20 bp, synthetic construct
  source 1..20: mol_type = other DNA
ttagcaagatgaataaagtt

SEQ ID NO: 155035 - DNA, 20 bp, synthetic construct
  source 1..20: mol_type = other DNA
attagcaagatgaataaagt

SEQ ID NO: 155036 - DNA, 20 bp, synthetic construct
  source 1..20: mol_type = other DNA
aattagcaagatgaataaag

SEQ ID NO: 155037 - DNA, 20 bp, synthetic construct
  source 1..20: mol_type = other DNA
aaattagcaagatgaataaa

SEQ ID NO: 155038 - DNA, 20 bp, synthetic construct
  source 1..20: mol_type = other DNA
taaattagcaagatgaataa

SEQ ID NO: 155039 - DNA, 20 bp, synthetic construct
  source 1..20: mol_type = other DNA
ctaaattagcaagatgaata

SEQ ID NO: 155040 - DNA, 20 bp, synthetic construct
  source 1..20: mol_type = other DNA
actaaattagcaagatgaat

SEQ ID NO: 155041 - DNA, 20 bp, synthetic construct
  source 1..20: mol_type = other DNA
aactaaattagcaagatgaa

SEQ ID NO: 155042 - DNA, 20 bp, synthetic construct
  source 1..20: mol_type = other DNA
aaactaaattagcaagatga

SEQ ID NO: 155043 - DNA, 20 bp, synthetic construct
  source 1..20: mol_type = other DNA
gaaactaaattagcaagatg

SEQ ID NO: 155044 - DNA, 20 bp, synthetic construct
  source 1..20: mol_type = other DNA
tgaaactaaattagcaagat

SEQ ID NO: 155045 - DNA, 20 bp, synthetic construct
  source 1..20: mol_type = other DNA
ttgaaactaaattagcaaga

SEQ ID NO: 155046 - DNA, 20 bp, synthetic construct
  source 1..20: mol_type = other DNA
tttgaaactaaattagcaag

SEQ ID NO: 155047 - DNA, 20 bp, synthetic construct
  source 1..20: mol_type = other DNA
atttgaaactaaattagcaa

SEQ ID NO: 155048 - DNA, 20 bp, synthetic construct
  source 1..20: mol_type = other DNA
tatttgaaactaaattagca

SEQ ID NO: 155049 - DNA, 20 bp, synthetic construct
  source 1..20: mol_type = other DNA
ctatttgaaactaaattagc

SEQ ID NO: 155050 - DNA, 20 bp, synthetic construct
  source 1..20: mol_type = other DNA
actatttgaaactaaattag

SEQ ID NO: 155051 - DNA, 20 bp, synthetic construct
  source 1..20: mol_type = other DNA
cactatttgaaactaaatta

SEQ ID NO: 155052 - DNA, 20 bp, synthetic construct
  source 1..20: mol_type = other DNA
tcactatttgaaactaaatt

SEQ ID NO: 155053 - DNA, 20 bp, synthetic construct
  source 1..20: mol_type = other DNA
atcactatttgaaactaaat

SEQ ID NO: 155054 - DNA, 20 bp, synthetic construct
  source 1..20: mol_type = other DNA
aatcactatttgaaactaaa

SEQ ID NO: 155055 - DNA, 20 bp, synthetic construct
  source 1..20: mol_type = other DNA
aaatcactatttgaaactaa

SEQ ID NO: 155056 - DNA, 20 bp, synthetic construct
  source 1..20: mol_type = other DNA
caaatcactatttgaaacta

SEQ ID NO: 155057 - DNA, 20 bp, synthetic construct
  source 1..20: mol_type = other DNA
acaaatcactatttgaaact

SEQ ID NO: 155058 - DNA, 20 bp, synthetic construct
  source 1..20: mol_type = other DNA
tacaaatcactatttgaaac

SEQ ID NO: 155059 - DNA, 20 bp, synthetic construct
  source 1..20: mol_type = other DNA
ttacaaatcactatttgaaa

SEQ ID NO: 155060 - DNA, 20 bp, synthetic construct
  source 1..20: mol_type = other DNA
attacaaatcactatttgaa

SEQ ID NO: 155061 - DNA, 20 bp, synthetic construct
  source 1..20: mol_type = other DNA
cattacaaatcactatttga

SEQ ID NO: 155062 - DNA, 20 bp, synthetic construct
  source 1..20: mol_type = other DNA
tcattacaaatcactatttg

SEQ ID NO: 155063 - DNA, 20 bp, synthetic construct
  source 1..20: mol_type = other DNA
atcattacaaatcactattt

SEQ ID NO: 155064 - DNA, 20 bp, synthetic construct
  source 1..20: mol_type = other DNA
gatcattacaaatcactatt

SEQ ID NO: 155065 - DNA, 20 bp, synthetic construct
  source 1..20: mol_type = other DNA
tgatcattacaaatcactat

SEQ ID NO: 155066 - DNA, 20 bp, synthetic construct
  source 1..20: mol_type = other DNA
ctgatcattacaaatcacta

SEQ ID NO: 155067 - DNA, 20 bp, synthetic construct
  source 1..20: mol_type = other DNA
tctgatcattacaaatcact

SEQ ID NO: 155068 - DNA, 20 bp, synthetic construct
  source 1..20: mol_type = other DNA
atctgatcattacaaatcac

SEQ ID NO: 155069 - DNA, 20 bp, synthetic construct
  source 1..20: mol_type = other DNA
aatctgatcattacaaatca

SEQ ID NO: 155070 - DNA, 20 bp, synthetic construct
  source 1..20: mol_type = other DNA
aaatctgatcattacaaatc

SEQ ID NO: 155071 - DNA, 20 bp, synthetic construct
  source 1..20: mol_type = other DNA
caaatctgatcattacaaat

SEQ ID NO: 155072 - DNA, 20 bp, synthetic construct
  source 1..20: mol_type = other DNA
tcaaatctgatcattacaaa

SEQ ID NO: 155073 - DNA, 20 bp, synthetic construct
  source 1..20: mol_type = other DNA
atcaaatctgatcattacaa

SEQ ID NO: 155074 - DNA, 20 bp, synthetic construct
  source 1..20: mol_type = other DNA
gatcaaatctgatcattaca

SEQ ID NO: 155075 - DNA, 20 bp, synthetic construct
  source 1..20: mol_type = other DNA
ggatcaaatctgatcattac

SEQ ID NO: 155076 - DNA, 20 bp, synthetic construct
  source 1..20: mol_type = other DNA
tggatcaaatctgatcatta

SEQ ID NO: 155077 - DNA, 20 bp, synthetic construct
  source 1..20: mol_type = other DNA
atggatcaaatctgatcatt

SEQ ID NO: 155078 - DNA, 20 bp, synthetic construct
  source 1..20: mol_type = other DNA
aatggatcaaatctgatcat

SEQ ID NO: 155079 - DNA, 20 bp, synthetic construct
  source 1..20: mol_type = other DNA
aaatggatcaaatctgatca

SEQ ID NO: 155080 - DNA, 20 bp, synthetic construct
  source 1..20: mol_type = other DNA
gaaatggatcaaatctgatc

SEQ ID NO: 155081 - DNA, 20 bp, synthetic construct
  source 1..20: mol_type = other DNA
agaaatggatcaaatctgat

SEQ ID NO: 155082 - DNA, 20 bp, synthetic construct
  source 1..20: mol_type = other DNA
cagaaatggatcaaatctga

SEQ ID NO: 155083 - DNA, 20 bp, synthetic construct
  source 1..20: mol_type = other DNA
acagaaatggatcaaatctg

SEQ ID NO: 155084 - DNA, 20 bp, synthetic construct
  source 1..20: mol_type = other DNA
tacagaaatggatcaaatct

SEQ ID NO: 155085 - DNA, 20 bp, synthetic construct
  source 1..20: mol_type = other DNA
ttacagaaatggatcaaatc

SEQ ID NO: 155086 - DNA, 20 bp, synthetic construct
  source 1..20: mol_type = other DNA
attacagaaatggatcaaat

SEQ ID NO: 155087 - DNA, 20 bp, synthetic construct
  source 1..20: mol_type = other DNA
aattacagaaatggatcaaa

SEQ ID NO: 155088 - DNA, 20 bp, synthetic construct
  source 1..20: mol_type = other DNA
caattacagaaatggatcaa

SEQ ID NO: 155089 - DNA, 20 bp, synthetic construct
  source 1..20: mol_type = other DNA
gcaattacagaaatggatca

SEQ ID NO: 155090 - DNA, 20 bp, synthetic construct
  source 1..20: mol_type = other DNA
agcaattacagaaatggatc

SEQ ID NO: 155091 - DNA, 20 bp, synthetic construct
  source 1..20: mol_type = other DNA
cagcaattacagaaatggat

SEQ ID NO: 155092 - DNA, 20 bp, synthetic construct
  source 1..20: mol_type = other DNA
tcagcaattacagaaatgga

SEQ ID NO: 155093 - DNA, 20 bp, synthetic construct
  source 1..20: mol_type = other DNA
ttcagcaattacagaaatgg

SEQ ID NO: 155094 - DNA, 20 bp, synthetic construct
  source 1..20: mol_type = other DNA
tttcagcaattacagaaatg

SEQ ID NO: 155095 - DNA, 20 bp, synthetic construct
  source 1..20: mol_type = other DNA
atttcagcaattacagaaat

SEQ ID NO: 155096 - DNA, 20 bp, synthetic construct
  source 1..20: mol_type = other DNA
aatttcagcaattacagaaa

SEQ ID NO: 155097 - DNA, 20 bp, synthetic construct
  source 1..20: mol_type = other DNA
gaatttcagcaattacagaa

SEQ ID NO: 155098 - DNA, 20 bp, synthetic construct
  source 1..20: mol_type = other DNA
ggaatttcagcaattacaga

SEQ ID NO: 155099 - DNA, 20 bp, synthetic construct
  source 1..20: mol_type = other DNA
gggaatttcagcaattacag

SEQ ID NO: 155100 - DNA, 20 bp, synthetic construct
  source 1..20: mol_type = other DNA
ggggaatttcagcaattaca

SEQ ID NO: 155101 - DNA, 20 bp, synthetic construct
  source 1..20: mol_type = other DNA
gggggaatttcagcaattac

SEQ ID NO: 155102 - DNA, 20 bp, synthetic construct
  source 1..20: mol_type = other DNA
cgggggaatttcagcaatta

SEQ ID NO: 155103 - DNA, 20 bp, synthetic construct
  source 1..20: mol_type = other DNA
tcgggggaatttcagcaatt

SEQ ID NO: 155104 - DNA, 20 bp, synthetic construct
  source 1..20: mol_type = other DNA
ctcgggggaatttcagcaat

SEQ ID NO: 155105 - DNA, 20 bp, synthetic construct
  source 1..20: mol_type = other DNA
actcgggggaatttcagcaa

SEQ ID NO: 155106 - DNA, 20 bp, synthetic construct
  source 1..20: mol_type = other DNA
aactcgggggaatttcagca

SEQ ID NO: 155107 - DNA, 20 bp, synthetic construct
  source 1..20: mol_type = other DNA
caactcgggggaatttcagc

SEQ ID NO: 155108 - DNA, 20 bp, synthetic construct
  source 1..20: mol_type = other DNA
gcaactcgggggaatttcag

SEQ ID NO: 155109 - DNA, 20 bp, synthetic construct
  source 1..20: mol_type = other DNA
agcaactcgggggaatttca

SEQ ID NO: 155110 - DNA, 20 bp, synthetic construct
  source 1..20: mol_type = other DNA
aagcaactcgggggaatttc

SEQ ID NO: 155111 - DNA, 20 bp, synthetic construct
  source 1..20: mol_type = other DNA
aaagcaactcgggggaattt

SEQ ID NO: 155112 - DNA, 20 bp, synthetic construct
  source 1..20: mol_type = other DNA
aaaagcaactcgggggaatt

SEQ ID NO: 155113 - DNA, 20 bp, synthetic construct
  source 1..20: mol_type = other DNA
aaaaagcaactcgggggaat

SEQ ID NO: 155114 - DNA, 20 bp, synthetic construct
  source 1..20: mol_type = other DNA
caaaaagcaactcgggggaa

SEQ ID NO: 155115 - DNA, 20 bp, synthetic construct
  source 1..20: mol_type = other DNA
ccaaaaagcaactcggggga

SEQ ID NO: 155116 - DNA, 20 bp, synthetic construct
  source 1..20: mol_type = other DNA
gccaaaaagcaactcggggg

SEQ ID NO: 155117 - DNA, 20 bp, synthetic construct
  source 1..20: mol_type = other DNA
agccaaaaagcaactcgggg

SEQ ID NO: 155118 - DNA, 20 bp, synthetic construct
  source 1..20: mol_type = other DNA
aagccaaaaagcaactcggg

SEQ ID NO: 155119 - DNA, 20 bp, synthetic construct
  source 1..20: mol_type = other DNA
aaagccaaaaagcaactcgg

SEQ ID NO: 155120 - DNA, 20 bp, synthetic construct
  source 1..20: mol_type = other DNA
taaagccaaaaagcaactcg

SEQ ID NO: 155121 - DNA, 20 bp, synthetic construct
  source 1..20: mol_type = other DNA
gtaaagccaaaaagcaactc

SEQ ID NO: 155122 - DNA, 20 bp, synthetic construct
  source 1..20: mol_type = other DNA
ggtaaagccaaaaagcaact

SEQ ID NO: 155123 - DNA, 20 bp, synthetic construct
  source 1..20: mol_type = other DNA
cggtaaagccaaaaagcaac

SEQ ID NO: 155124 - DNA, 20 bp, synthetic construct
  source 1..20: mol_type = other DNA
gcggtaaagccaaaaagcaa

SEQ ID NO: 155125 - DNA, 20 bp, synthetic construct
  source 1..20: mol_type = other DNA
ggcggtaaagccaaaaagca

SEQ ID NO: 155126 - DNA, 20 bp, synthetic construct
  source 1..20: mol_type = other DNA
aggcggtaaagccaaaaagc

SEQ ID NO: 155127 - DNA, 20 bp, synthetic construct
  source 1..20: mol_type = other DNA
gaggcggtaaagccaaaaag

SEQ ID NO: 155128 - DNA, 20 bp, synthetic construct
  source 1..20: mol_type = other DNA
agaggcggtaaagccaaaaa

SEQ ID NO: 155129 - DNA, 20 bp, synthetic construct
  source 1..20: mol_type = other DNA
cagaggcggtaaagccaaaa

SEQ ID NO: 155130 - DNA, 20 bp, synthetic construct
  source 1..20: mol_type = other DNA
ccagaggcggtaaagccaaa

SEQ ID NO: 155131 - DNA, 20 bp, synthetic construct
  source 1..20: mol_type = other DNA
accagaggcggtaaagccaa

SEQ ID NO: 155132 - DNA, 20 bp, synthetic construct
  source 1..20: mol_type = other DNA
gaccagaggcggtaaagcca

SEQ ID NO: 155133 - DNA, 20 bp, synthetic construct
  source 1..20: mol_type = other DNA
agaccagaggcggtaaagcc

SEQ ID NO: 155134 - DNA, 20 bp, synthetic construct
  source 1..20: mol_type = other DNA
cagaccagaggcggtaaagc

SEQ ID NO: 155135 - DNA, 20 bp, synthetic construct
  source 1..20: mol_type = other DNA
ccagaccagaggcggtaaag

SEQ ID NO: 155136 - DNA, 20 bp, synthetic construct
  source 1..20: mol_type = other DNA
cccagaccagaggcggtaaa

SEQ ID NO: 155137 - DNA, 20 bp, synthetic construct
  source 1..20: mol_type = other DNA
tcccagaccagaggcggtaa

SEQ ID NO: 155138 - DNA, 20 bp, synthetic construct
  source 1..20: mol_type = other DNA
ctcccagaccagaggcggta

SEQ ID NO: 155139 - DNA, 20 bp, synthetic construct
  source 1..20: mol_type = other DNA
cctcccagaccagaggcggt

SEQ ID NO: 155140 - DNA, 20 bp, synthetic construct
  source 1..20: mol_type = other DNA
acctcccagaccagaggcgg

SEQ ID NO: 155141 - DNA, 20 bp, synthetic construct
  source 1..20: mol_type = other DNA
cacctcccagaccagaggcg

SEQ ID NO: 155142 - DNA, 20 bp, synthetic construct
  source 1..20: mol_type = other DNA
tcacctcccagaccagaggc

SEQ ID NO: 155143 - DNA, 20 bp, synthetic construct
  source 1..20: mol_type = other DNA
atcacctcccagaccagagg

SEQ ID NO: 155144 - DNA, 20 bp, synthetic construct
  source 1..20: mol_type = other DNA
aatcacctcccagaccagag

SEQ ID NO: 155145 - DNA, 20 bp, synthetic construct
  source 1..20: mol_type = other DNA
caatcacctcccagaccaga

SEQ ID NO: 155146 - DNA, 20 bp, synthetic construct
  source 1..20: mol_type = other DNA
gcaatcacctcccagaccag

SEQ ID NO: 155147 - DNA, 20 bp, synthetic construct
  source 1..20: mol_type = other DNA
agcaatcacctcccagacca

SEQ ID NO: 155148 - DNA, 20 bp, synthetic construct
  source 1..20: mol_type = other DNA
gagcaatcacctcccagacc

SEQ ID NO: 155149 - DNA, 20 bp, synthetic construct
  source 1..20: mol_type = other DNA
agagcaatcacctcccagac

SEQ ID NO: 155150 - DNA, 20 bp, synthetic construct
  source 1..20: mol_type = other DNA
cagagcaatcacctcccaga

SEQ ID NO: 155151 - DNA, 20 bp, synthetic construct
  source 1..20: mol_type = other DNA
gcagagcaatcacctcccag

SEQ ID NO: 155152 - DNA, 20 bp, synthetic construct
  source 1..20: mol_type = other DNA
agcagagcaatcacctccca

SEQ ID NO: 155153 - DNA, 20 bp, synthetic construct
  source 1..20: mol_type = other DNA
cagcagagcaatcacctccc

SEQ ID NO: 155154 - DNA, 20 bp, synthetic construct
  source 1..20: mol_type = other DNA
gcagcagagcaatcacctcc

SEQ ID NO: 155155 - DNA, 20 bp, synthetic construct
  source 1..20: mol_type = other DNA
agcagcagagcaatcacctc

SEQ ID NO: 155156 - DNA, 20 bp, synthetic construct
  source 1..20: mol_type = other DNA
aagcagcagagcaatcacct

SEQ ID NO: 155157 - DNA, 20 bp, synthetic construct
  source 1..20: mol_type = other DNA
gaagcagcagagcaatcacc

SEQ ID NO: 155158 - DNA, 20 bp, synthetic construct
  source 1..20: mol_type = other DNA
ggaagcagcagagcaatcac

SEQ ID NO: 155159 - DNA, 20 bp, synthetic construct
  source 1..20: mol_type = other DNA
aggaagcagcagagcaatca

SEQ ID NO: 155160 - DNA, 20 bp, synthetic construct
  source 1..20: mol_type = other DNA
caggaagcagcagagcaatc

SEQ ID NO: 155161 - DNA, 20 bp, synthetic construct
  source 1..20: mol_type = other DNA
acaggaagcagcagagcaat

SEQ ID NO: 155162 - DNA, 20 bp, synthetic construct
  source 1..20: mol_type = other DNA
tacaggaagcagcagagcaa

SEQ ID NO: 155163 - DNA, 20 bp, synthetic construct
  source 1..20: mol_type = other DNA
ttacaggaagcagcagagca

SEQ ID NO: 155164 - DNA, 20 bp, synthetic construct
  source 1..20: mol_type = other DNA
gttacaggaagcagcagagc

SEQ ID NO: 155165 - DNA, 20 bp, synthetic construct
  source 1..20: mol_type = other DNA
agttacaggaagcagcagag

SEQ ID NO: 155166 - DNA, 20 bp, synthetic construct
  source 1..20: mol_type = other DNA
aagttacaggaagcagcaga

SEQ ID NO: 155167 - DNA, 20 bp, synthetic construct
  source 1..20: mol_type = other DNA
caagttacaggaagcagcag

SEQ ID NO: 155168 - DNA, 20 bp, synthetic construct
  source 1..20: mol_type = other DNA
gcaagttacaggaagcagca

SEQ ID NO: 155169 - DNA, 20 bp, synthetic construct
  source 1..20: mol_type = other DNA
ggcaagttacaggaagcagc

SEQ ID NO: 155170 - DNA, 20 bp, synthetic construct
  source 1..20: mol_type = other DNA
aggcaagttacaggaagcag

SEQ ID NO: 155171 - DNA, 20 bp, synthetic construct
  source 1..20: mol_type = other DNA
caggcaagttacaggaagca

SEQ ID NO: 155172 - DNA, 20 bp, synthetic construct
  source 1..20: mol_type = other DNA
gcaggcaagttacaggaagc

SEQ ID NO: 155173 - DNA, 20 bp, synthetic construct
  source 1..20: mol_type = other DNA
ggcaggcaagttacaggaag

SEQ ID NO: 155174 - DNA, 20 bp, synthetic construct
  source 1..20: mol_type = other DNA
aggcaggcaagttacaggaa

SEQ ID NO: 155175 - DNA, 20 bp, synthetic construct
  source 1..20: mol_type = other DNA
aaggcaggcaagttacagga

SEQ ID NO: 155176 - DNA, 20 bp, synthetic construct
  source 1..20: mol_type = other DNA
aaaggcaggcaagttacagg

SEQ ID NO: 155177 - DNA, 20 bp, synthetic construct
  source 1..20: mol_type = other DNA
gaaaggcaggcaagttacag

SEQ ID NO: 155178 - DNA, 20 bp, synthetic construct
  source 1..20: mol_type = other DNA
agaaaggcaggcaagttaca

SEQ ID NO: 155179 - DNA, 20 bp, synthetic construct
  source 1..20: mol_type = other DNA
gagaaaggcaggcaagttac

SEQ ID NO: 155180 - DNA, 20 bp, synthetic construct
  source 1..20: mol_type = other DNA
ggagaaaggcaggcaagtta

SEQ ID NO: 155181 - DNA, 20 bp, synthetic construct
  source 1..20: mol_type = other DNA
gggagaaaggcaggcaagtt

SEQ ID NO: 155182 - DNA, 20 bp, synthetic construct
  source 1..20: mol_type = other DNA
agggagaaaggcaggcaagt

SEQ ID NO: 155183 - DNA, 20 bp, synthetic construct
  source 1..20: mol_type = other DNA
cagggagaaaggcaggcaag

SEQ ID NO: 155184 - DNA, 20 bp, synthetic construct
  source 1..20: mol_type = other DNA
acagggagaaaggcaggcaa

SEQ ID NO: 155185 - DNA, 20 bp, synthetic construct
  source 1..20: mol_type = other DNA
cacagggagaaaggcaggca

SEQ ID NO: 155186 - DNA, 20 bp, synthetic construct
  source 1..20: mol_type = other DNA
acacagggagaaaggcaggc

SEQ ID NO: 155187 - DNA, 20 bp, synthetic construct
  source 1..20: mol_type = other DNA
cacacagggagaaaggcagg

SEQ ID NO: 155188 - DNA, 20 bp, synthetic construct
  source 1..20: mol_type = other DNA
ccacacagggagaaaggcag

SEQ ID NO: 155189 - DNA, 20 bp, synthetic construct
  source 1..20: mol_type = other DNA
cccacacagggagaaaggca

SEQ ID NO: 155190 - DNA, 20 bp, synthetic construct
  source 1..20: mol_type = other DNA
tcccacacagggagaaaggc

SEQ ID NO: 155191 - DNA, 20 bp, synthetic construct
  source 1..20: mol_type = other DNA
gtcccacacagggagaaagg

SEQ ID NO: 155192 - DNA, 20 bp, synthetic construct
  source 1..20: mol_type = other DNA
agtcccacacagggagaaag

SEQ ID NO: 155193 - DNA, 20 bp, synthetic construct
  source 1..20: mol_type = other DNA
gagtcccacacagggagaaa

SEQ ID NO: 155194 - DNA, 20 bp, synthetic construct
  source 1..20: mol_type = other DNA
ggagtcccacacagggagaa

SEQ ID NO: 155195 - DNA, 20 bp, synthetic construct
  source 1..20: mol_type = other DNA
aggagtcccacacagggaga

SEQ ID NO: 155196 - DNA, 20 bp, synthetic construct
  source 1..20: mol_type = other DNA
caggagtcccacacagggag

SEQ ID NO: 155197 - DNA, 20 bp, synthetic construct
  source 1..20: mol_type = other DNA
gcaggagtcccacacaggga

SEQ ID NO: 155198 - DNA, 20 bp, synthetic construct
  source 1..20: mol_type = other DNA
cgcaggagtcccacacaggg

SEQ ID NO: 155199 - DNA, 20 bp, synthetic construct
  source 1..20: mol_type = other DNA
ccgcaggagtcccacacagg

SEQ ID NO: 155200 - DNA, 20 bp, synthetic construct
  source 1..20: mol_type = other DNA
cccgcaggagtcccacacag

SEQ ID NO: 155201 - DNA, 20 bp, synthetic construct
  source 1..20: mol_type = other DNA
acccgcaggagtcccacaca

SEQ ID NO: 155202 - DNA, 20 bp, synthetic construct
  source 1..20: mol_type = other DNA
cacccgcaggagtcccacac

SEQ ID NO: 155203 - DNA, 20 bp, synthetic construct
  source 1..20: mol_type = other DNA
tcacccgcaggagtcccaca

SEQ ID NO: 155204 - DNA, 20 bp, synthetic construct
  source 1..20: mol_type = other DNA
ctcacccgcaggagtcccac

SEQ ID NO: 155205 - DNA, 20 bp, synthetic construct
  source 1..20: mol_type = other DNA
tctcacccgcaggagtccca

SEQ ID NO: 155206 - DNA, 20 bp, synthetic construct
  source 1..20: mol_type = other DNA
ctctcacccgcaggagtccc

SEQ ID NO: 155207 - DNA, 20 bp, synthetic construct
  source 1..20: mol_type = other DNA
gctctcacccgcaggagtcc

SEQ ID NO: 155208 - DNA, 20 bp, synthetic construct
  source 1..20: mol_type = other DNA
cgctctcacccgcaggagtc

SEQ ID NO: 155209 - DNA, 20 bp, synthetic construct
  source 1..20: mol_type = other DNA
acgctctcacccgcaggagt

SEQ ID NO: 155210 - DNA, 20 bp, synthetic construct
  source 1..20: mol_type = other DNA
cacgctctcacccgcaggag

SEQ ID NO: 155211 - DNA, 20 bp, synthetic construct
  source 1..20: mol_type = other DNA
ccacgctctcacccgcagga

SEQ ID NO: 155212 - DNA, 20 bp, synthetic construct
  source 1..20: mol_type = other DNA
gccacgctctcacccgcagg

SEQ ID NO: 155213 - DNA, 20 bp, synthetic construct
  source 1..20: mol_type = other DNA
agccacgctctcacccgcag

SEQ ID NO: 155214 - DNA, 20 bp, synthetic construct
  source 1..20: mol_type = other DNA
cagccacgctctcacccgca

SEQ ID NO: 155215 - DNA, 20 bp, synthetic construct
  source 1..20: mol_type = other DNA
tcagccacgctctcacccgc

SEQ ID NO: 155216 - DNA, 20 bp, synthetic construct
  source 1..20: mol_type = other DNA
ttcagccacgctctcacccg

SEQ ID NO: 155217 - DNA, 20 bp, synthetic construct
  source 1..20: mol_type = other DNA
cttcagccacgctctcaccc

SEQ ID NO: 155218 - DNA, 20 bp, synthetic construct
  source 1..20: mol_type = other DNA
tcttcagccacgctctcacc

SEQ ID NO: 155219 - DNA, 20 bp, synthetic construct
  source 1..20: mol_type = other DNA
gtcttcagccacgctctcac

SEQ ID NO: 155220 - DNA, 20 bp, synthetic construct
  source 1..20: mol_type = other DNA
tgtcttcagccacgctctca

SEQ ID NO: 155221 - DNA, 20 bp, synthetic construct
  source 1..20: mol_type = other DNA
ctgtcttcagccacgctctc

SEQ ID NO: 155222 - DNA, 20 bp, synthetic construct
  source 1..20: mol_type = other DNA
gctgtcttcagccacgctct

SEQ ID NO: 155223 - DNA, 20 bp, synthetic construct
  source 1..20: mol_type = other DNA
ggctgtcttcagccacgctc

SEQ ID NO: 155224 - DNA, 20 bp, synthetic construct
  source 1..20: mol_type = other DNA
cggctgtcttcagccacgct

SEQ ID NO: 155225 - DNA, 20 bp, synthetic construct
  source 1..20: mol_type = other DNA
acggctgtcttcagccacgc

SEQ ID NO: 155226 - DNA, 20 bp, synthetic construct
  source 1..20: mol_type = other DNA
cacggctgtcttcagccacg

SEQ ID NO: 155227 - DNA, 20 bp, synthetic construct
  source 1..20: mol_type = other DNA
acacggctgtcttcagccac

SEQ ID NO: 155228 - DNA, 20 bp, synthetic construct
  source 1..20: mol_type = other DNA
aacacggctgtcttcagcca

SEQ ID NO: 155229 - DNA, 20 bp, synthetic construct
  source 1..20: mol_type = other DNA
taacacggctgtcttcagcc

SEQ ID NO: 155230 - DNA, 20 bp, synthetic construct
  source 1..20: mol_type = other DNA
ataacacggctgtcttcagc

SEQ ID NO: 155231 - DNA, 20 bp, synthetic construct
  source 1..20: mol_type = other DNA
cataacacggctgtcttcag

SEQ ID NO: 155232 - DNA, 20 bp, synthetic construct
  source 1..20: mol_type = other DNA
tcataacacggctgtcttca

SEQ ID NO: 155233 - DNA, 20 bp, synthetic construct
  source 1..20: mol_type = other DNA
ttcataacacggctgtcttc

SEQ ID NO: 155234 - DNA, 20 bp, synthetic construct
  source 1..20: mol_type = other DNA
tttcataacacggctgtctt

SEQ ID NO: 155235 - DNA, 20 bp, synthetic construct
  source 1..20: mol_type = other DNA
ctttcataacacggctgtct

SEQ ID NO: 155236 - DNA, 20 bp, synthetic construct
  source 1..20: mol_type = other DNA
cctttcataacacggctgtc

SEQ ID NO: 155237 - DNA, 20 bp, synthetic construct
  source 1..20: mol_type = other DNA
ccctttcataacacggctgt

SEQ ID NO: 155238 - DNA, 20 bp, synthetic construct
  source 1..20: mol_type = other DNA
gccctttcataacacggctg

SEQ ID NO: 155239 - DNA, 20 bp, synthetic construct
  source 1..20: mol_type = other DNA
ggccctttcataacacggct

SEQ ID NO: 155240 - DNA, 20 bp, synthetic construct
  source 1..20: mol_type = other DNA
aggccctttcataacacggc

SEQ ID NO: 155241 - DNA, 20 bp, synthetic construct
  source 1..20: mol_type = other DNA
gaggccctttcataacacgg

SEQ ID NO: 155242 - DNA, 20 bp, synthetic construct
  source 1..20: mol_type = other DNA
ggaggccctttcataacacg

SEQ ID NO: 155243 - DNA, 20 bp, synthetic construct
  source 1..20: mol_type = other DNA
aggaggccctttcataacac

SEQ ID NO: 155244 - DNA, 20 bp, synthetic construct
  source 1..20: mol_type = other DNA
caggaggccctttcataaca

SEQ ID NO: 155245 - DNA, 20 bp, synthetic construct
  source 1..20: mol_type = other DNA
acaggaggccctttcataac

SEQ ID NO: 155246 - DNA, 20 bp, synthetic construct
  source 1..20: mol_type = other DNA
cacaggaggccctttcataa

SEQ ID NO: 155247 - DNA, 20 bp, synthetic construct
  source 1..20: mol_type = other DNA
gcacaggaggccctttcata

SEQ ID NO: 155248 - DNA, 20 bp, synthetic construct
  source 1..20: mol_type = other DNA
agcacaggaggccctttcat

SEQ ID NO: 155249 - DNA, 20 bp, synthetic construct
  source 1..20: mol_type = other DNA
cagcacaggaggccctttca

SEQ ID NO: 155250 - DNA, 20 bp, synthetic construct
  source 1..20: mol_type = other DNA
acagcacaggaggccctttc

SEQ ID NO: 155251 - DNA, 20 bp, synthetic construct
  source 1..20: mol_type = other DNA
gacagcacaggaggcccttt

SEQ ID NO: 155252 - DNA, 20 bp, synthetic construct
  source 1..20: mol_type = other DNA
cgacagcacaggaggccctt

SEQ ID NO: 155253 - DNA, 20 bp, synthetic construct
  source 1..20: mol_type = other DNA
tcgacagcacaggaggccct

SEQ ID NO: 155254 - DNA, 20 bp, synthetic construct
  source 1..20: mol_type = other DNA
ctcgacagcacaggaggccc

SEQ ID NO: 155255 - DNA, 20 bp, synthetic construct
  source 1..20: mol_type = other DNA
cctcgacagcacaggaggcc

SEQ ID NO: 155256 - DNA, 20 bp, synthetic construct
  source 1..20: mol_type = other DNA
acctcgacagcacaggaggc

SEQ ID NO: 155257 - DNA, 20 bp, synthetic construct
  source 1..20: mol_type = other DNA
aacctcgacagcacaggagg

SEQ ID NO: 155258 - DNA, 20 bp, synthetic construct
  source 1..20: mol_type = other DNA
caacctcgacagcacaggag

SEQ ID NO: 155259 - DNA, 20 bp, synthetic construct
  source 1..20: mol_type = other DNA
acaacctcgacagcacagga

SEQ ID NO: 155260 - DNA, 20 bp, synthetic construct
  source 1..20: mol_type = other DNA
cacaacctcgacagcacagg

SEQ ID NO: 155261 - DNA, 20 bp, synthetic construct
  source 1..20: mol_type = other DNA
gcacaacctcgacagcacag

SEQ ID NO: 155262 - DNA, 20 bp, synthetic construct
  source 1..20: mol_type = other DNA
agcacaacctcgacagcaca

SEQ ID NO: 155263 - DNA, 20 bp, synthetic construct
  source 1..20: mol_type = other DNA
gagcacaacctcgacagcac

SEQ ID NO: 155264 - DNA, 20 bp, synthetic construct
  source 1..20: mol_type = other DNA
agagcacaacctcgacagca

SEQ ID NO: 155265 - DNA, 20 bp, synthetic construct
  source 1..20: mol_type = other DNA
cagagcacaacctcgacagc

SEQ ID NO: 155266 - DNA, 20 bp, synthetic construct
  source 1..20: mol_type = other DNA
acagagcacaacctcgacag

SEQ ID NO: 155267 - DNA, 20 bp, synthetic construct
  source 1..20: mol_type = other DNA
cacagagcacaacctcgaca

SEQ ID NO: 155268 - DNA, 20 bp, synthetic construct
  source 1..20: mol_type = other DNA
tcacagagcacaacctcgac

SEQ ID NO: 155269 - DNA, 20 bp, synthetic construct
  source 1..20: mol_type = other DNA
ttcacagagcacaacctcga

SEQ ID NO: 155270 - DNA, 20 bp, synthetic construct
  source 1..20: mol_type = other DNA
attcacagagcacaacctcg

SEQ ID NO: 155271 - DNA, 20 bp, synthetic construct
  source 1..20: mol_type = other DNA
cattcacagagcacaacctc

SEQ ID NO: 155272 - DNA, 20 bp, synthetic construct
  source 1..20: mol_type = other DNA
acattcacagagcacaacct

SEQ ID NO: 155273 - DNA, 20 bp, synthetic construct
  source 1..20: mol_type = other DNA
gacattcacagagcacaacc

SEQ ID NO: 155274 - DNA, 20 bp, synthetic construct
  source 1..20: mol_type = other DNA
tgacattcacagagcacaac

SEQ ID NO: 155275 - DNA, 20 bp, synthetic construct
  source 1..20: mol_type = other DNA
atgacattcacagagcacaa

SEQ ID NO: 155276 - DNA, 20 bp, synthetic construct
  source 1..20: mol_type = other DNA
gatgacattcacagagcaca

SEQ ID NO: 155277 - DNA, 20 bp, synthetic construct
  source 1..20: mol_type = other DNA
ggatgacattcacagagcac

SEQ ID NO: 155278 - DNA, 20 bp, synthetic construct
  source 1..20: mol_type = other DNA
gggatgacattcacagagca

SEQ ID NO: 155279 - DNA, 20 bp, synthetic construct
  source 1..20: mol_type = other DNA
ggggatgacattcacagagc

SEQ ID NO: 155280 - DNA, 20 bp, synthetic construct
  source 1..20: mol_type = other DNA
aggggatgacattcacagag

SEQ ID NO: 155281 - DNA, 20 bp, synthetic construct
  source 1..20: mol_type = other DNA
caggggatgacattcacaga

SEQ ID NO: 155282 - DNA, 20 bp, synthetic construct
  source 1..20: mol_type = other DNA
ccaggggatgacattcacag

SEQ ID NO: 155283 - DNA, 20 bp, synthetic construct
  source 1..20: mol_type = other DNA
accaggggatgacattcaca

SEQ ID NO: 155284 - DNA, 20 bp, synthetic construct
  source 1..20: mol_type = other DNA
caccaggggatgacattcac

SEQ ID NO: 155285 - DNA, 20 bp, synthetic construct
  source 1..20: mol_type = other DNA
gcaccaggggatgacattca

SEQ ID NO: 155286 - DNA, 20 bp, synthetic construct
  source 1..20: mol_type = other DNA
tgcaccaggggatgacattc

SEQ ID NO: 155287 - DNA, 20 bp, synthetic construct
  source 1..20: mol_type = other DNA
gtgcaccaggggatgacatt

SEQ ID NO: 155288 - DNA, 20 bp, synthetic construct
  source 1..20: mol_type = other DNA
tgtgcaccaggggatgacat

SEQ ID NO: 155289 - DNA, 20 bp, synthetic construct
  source 1..20: mol_type = other DNA
ctgtgcaccaggggatgaca

SEQ ID NO: 155290 - DNA, 20 bp, synthetic construct
  source 1..20: mol_type = other DNA
gctgtgcaccaggggatgac

SEQ ID NO: 155291 - DNA, 20 bp, synthetic construct
  source 1..20: mol_type = other DNA
tgctgtgcaccaggggatga

SEQ ID NO: 155292 - DNA, 20 bp, synthetic construct
  source 1..20: mol_type = other DNA
ctgctgtgcaccaggggatg

SEQ ID NO: 155293 - DNA, 20 bp, synthetic construct
  source 1..20: mol_type = other DNA
gctgctgtgcaccaggggat

SEQ ID NO: 155294 - DNA, 20 bp, synthetic construct
  source 1..20: mol_type = other DNA
tgctgctgtgcaccagggga

SEQ ID NO: 155295 - DNA, 20 bp, synthetic construct
  source 1..20: mol_type = other DNA
gtgctgctgtgcaccagggg

SEQ ID NO: 155296 - DNA, 20 bp, synthetic construct
  source 1..20: mol_type = other DNA
ggtgctgctgtgcaccaggg

SEQ ID NO: 155297 - DNA, 20 bp, synthetic construct
  source 1..20: mol_type = other DNA
aggtgctgctgtgcaccagg

SEQ ID NO: 155298 - DNA, 20 bp, synthetic construct
  source 1..20: mol_type = other DNA
aaggtgctgctgtgcaccag

SEQ ID NO: 155299 - DNA, 20 bp, synthetic construct
  source 1..20: mol_type = other DNA
gaaggtgctgctgtgcacca

SEQ ID NO: 155300 - DNA, 20 bp, synthetic construct
  source 1..20: mol_type = other DNA
agaaggtgctgctgtgcacc

SEQ ID NO: 155301 - DNA, 20 bp, synthetic construct
  source 1..20: mol_type = other DNA
tagaaggtgctgctgtgcac

SEQ ID NO: 155302 - DNA, 20 bp, synthetic construct
  source 1..20: mol_type = other DNA
gtagaaggtgctgctgtgca

SEQ ID NO: 155303 - DNA, 20 bp, synthetic construct
  source 1..20: mol_type = other DNA
tgtagaaggtgctgctgtgc

SEQ ID NO: 155304 - DNA, 20 bp, synthetic construct
  source 1..20: mol_type = other DNA
gtgtagaaggtgctgctgtg

SEQ ID NO: 155305 - DNA, 20 bp, synthetic construct
  source 1..20: mol_type = other DNA
tgtgtagaaggtgctgctgt

SEQ ID NO: 155306 - DNA, 20 bp, synthetic construct
  source 1..20: mol_type = other DNA
ctgtgtagaaggtgctgctg

SEQ ID NO: 155307 - DNA, 20 bp, synthetic construct
  source 1..20: mol_type = other DNA
cctgtgtagaaggtgctgct

SEQ ID NO: 155308 - DNA, 20 bp, synthetic construct
  source 1..20: mol_type = other DNA
tcctgtgtagaaggtgctgc

SEQ ID NO: 155309 - DNA, 20 bp, synthetic construct
  source 1..20: mol_type = other DNA
atcctgtgtagaaggtgctg

SEQ ID NO: 155310 - DNA, 20 bp, synthetic construct
  source 1..20: mol_type = other DNA
tatcctgtgtagaaggtgct

SEQ ID NO: 155311 - DNA, 20 bp, synthetic construct
  source 1..20: mol_type = other DNA
gtatcctgtgtagaaggtgc

SEQ ID NO: 155312 - DNA, 20 bp, synthetic construct
  source 1..20: mol_type = other DNA
tgtatcctgtgtagaaggtg

SEQ ID NO: 155313 - DNA, 20 bp, synthetic construct
  source 1..20: mol_type = other DNA
ctgtatcctgtgtagaaggt

SEQ ID NO: 155314 - DNA, 20 bp, synthetic construct
  source 1..20: mol_type = other DNA
actgtatcctgtgtagaagg

SEQ ID NO: 155315 - DNA, 20 bp, synthetic construct
  source 1..20: mol_type = other DNA
aactgtatcctgtgtagaag

SEQ ID NO: 155316 - DNA, 20 bp, synthetic construct
  source 1..20: mol_type = other DNA
caactgtatcctgtgtagaa

SEQ ID NO: 155317 - DNA, 20 bp, synthetic construct
  source 1..20: mol_type = other DNA
ccaactgtatcctgtgtaga

SEQ ID NO: 155318 - DNA, 20 bp, synthetic construct
  source 1..20: mol_type = other DNA
tccaactgtatcctgtgtag

SEQ ID NO: 155319 - DNA, 20 bp, synthetic construct
  source 1..20: mol_type = other DNA
ttccaactgtatcctgtgta

SEQ ID NO: 155320 - DNA, 20 bp, synthetic construct
  source 1..20: mol_type = other DNA
attccaactgtatcctgtgt

SEQ ID NO: 155321 - DNA, 20 bp, synthetic construct
  source 1..20: mol_type = other DNA
cattccaactgtatcctgtg

SEQ ID NO: 155322 - DNA, 20 bp, synthetic construct
  source 1..20: mol_type = other DNA
gcattccaactgtatcctgt

SEQ ID NO: 155323 - DNA, 20 bp, synthetic construct
  source 1..20: mol_type = other DNA
ggcattccaactgtatcctg

SEQ ID NO: 155324 - DNA, 20 bp, synthetic construct
  source 1..20: mol_type = other DNA
cggcattccaactgtatcct

SEQ ID NO: 155325 - DNA, 20 bp, synthetic construct
  source 1..20: mol_type = other DNA
gcggcattccaactgtatcc

SEQ ID NO: 155326 - DNA, 20 bp, synthetic construct
  source 1..20: mol_type = other DNA
ggcggcattccaactgtatc

SEQ ID NO: 155327 - DNA, 20 bp, synthetic construct
  source 1..20: mol_type = other DNA
gggcggcattccaactgtat

SEQ ID NO: 155328 - DNA, 20 bp, synthetic construct
  source 1..20: mol_type = other DNA
ggggcggcattccaactgta

SEQ ID NO: 155329 - DNA, 20 bp, synthetic construct
  source 1..20: mol_type = other DNA
gggggcggcattccaactgt

SEQ ID NO: 155330 - DNA, 20 bp, synthetic construct
  source 1..20: mol_type = other DNA
agggggcggcattccaactg

SEQ ID NO: 155331 - DNA, 20 bp, synthetic construct
  source 1..20: mol_type = other DNA
gagggggcggcattccaact

SEQ ID NO: 155332 - DNA, 20 bp, synthetic construct
  source 1..20: mol_type = other DNA
cgagggggcggcattccaac

SEQ ID NO: 155333 - DNA, 20 bp, synthetic construct
  source 1..20: mol_type = other DNA
tcgagggggcggcattccaa

SEQ ID NO: 155334 - DNA, 20 bp, synthetic construct
  source 1..20: mol_type = other DNA
ctcgagggggcggcattcca

SEQ ID NO: 155335 - DNA, 20 bp, synthetic construct
  source 1..20: mol_type = other DNA
actcgagggggcggcattcc

SEQ ID NO: 155336 - DNA, 20 bp, synthetic construct
  source 1..20: mol_type = other DNA
aactcgagggggcggcattc

SEQ ID NO: 155337 - DNA, 20 bp, synthetic construct
  source 1..20: mol_type = other DNA
caactcgagggggcggcatt

SEQ ID NO: 155338 - DNA, 20 bp, synthetic construct
  source 1..20: mol_type = other DNA
acaactcgagggggcggcat

SEQ ID NO: 155339 - DNA, 20 bp, synthetic construct
  source 1..20: mol_type = other DNA
cacaactcgagggggcggca

SEQ ID NO: 155340 - DNA, 20 bp, synthetic construct
  source 1..20: mol_type = other DNA
acacaactcgagggggcggc

SEQ ID NO: 155341 - DNA, 20 bp, synthetic construct
  source 1..20: mol_type = other DNA
tacacaactcgagggggcgg

SEQ ID NO: 155342 - DNA, 20 bp, synthetic construct
  source 1..20: mol_type = other DNA
ttacacaactcgagggggcg

SEQ ID NO: 155343 - DNA, 20 bp, synthetic construct
  source 1..20: mol_type = other DNA
cttacacaactcgagggggc

SEQ ID NO: 155344 - DNA, 20 bp, synthetic construct
  source 1..20: mol_type = other DNA
ccttacacaactcgaggggg

SEQ ID NO: 155345 - DNA, 20 bp, synthetic construct
  source 1..20: mol_type = other DNA
gccttacacaactcgagggg

SEQ ID NO: 155346 - DNA, 20 bp, synthetic construct
  source 1..20: mol_type = other DNA
tgccttacacaactcgaggg

SEQ ID NO: 155347 - DNA, 20 bp, synthetic construct
  source 1..20: mol_type = other DNA
ctgccttacacaactcgagg

SEQ ID NO: 155348 - DNA, 20 bp, synthetic construct
  source 1..20: mol_type = other DNA
gctgccttacacaactcgag

SEQ ID NO: 155349 - DNA, 20 bp, synthetic construct
  source 1..20: mol_type = other DNA
tgctgccttacacaactcga

SEQ ID NO: 155350 - DNA, 20 bp, synthetic construct
  source 1..20: mol_type = other DNA
ctgctgccttacacaactcg

SEQ ID NO: 155351 - DNA, 20 bp, synthetic construct
  source 1..20: mol_type = other DNA
gctgctgccttacacaactc

SEQ ID NO: 155352 - DNA, 20 bp, synthetic construct
  source 1..20: mol_type = other DNA
ggctgctgccttacacaact

SEQ ID NO: 155353 - DNA, 20 bp, synthetic construct
  source 1..20: mol_type = other DNA
aggctgctgccttacacaac

SEQ ID NO: 155354 - DNA, 20 bp, synthetic construct
  source 1..20: mol_type = other DNA
aaggctgctgccttacacaa

SEQ ID NO: 155355 - DNA, 20 bp, synthetic construct
  source 1..20: mol_type = other DNA
caaggctgctgccttacaca

SEQ ID NO: 155356 - DNA, 20 bp, synthetic construct
  source 1..20: mol_type = other DNA
ccaaggctgctgccttacac

SEQ ID NO: 155357 - DNA, 20 bp, synthetic construct
  source 1..20: mol_type = other DNA
gccaaggctgctgccttaca

SEQ ID NO: 155358 - DNA, 20 bp, synthetic construct
  source 1..20: mol_type = other DNA
ggccaaggctgctgccttac

SEQ ID NO: 155359 - DNA, 20 bp, synthetic construct
  source 1..20: mol_type = other DNA
gggccaaggctgctgcctta

SEQ ID NO: 155360 - DNA, 20 bp, synthetic construct
  source 1..20: mol_type = other DNA
agggccaaggctgctgcctt

SEQ ID NO: 155361 - DNA, 20 bp, synthetic construct
  source 1..20: mol_type = other DNA
aagggccaaggctgctgcct

SEQ ID NO: 155362 - DNA, 20 bp, synthetic construct
  source 1..20: mol_type = other DNA
caagggccaaggctgctgcc

SEQ ID NO: 155363 - DNA, 20 bp, synthetic construct
  source 1..20: mol_type = other DNA
gcaagggccaaggctgctgc

SEQ ID NO: 155364 - DNA, 20 bp, synthetic construct
  source 1..20: mol_type = other DNA
tgcaagggccaaggctgctg

SEQ ID NO: 155365 - DNA, 20 bp, synthetic construct
  source 1..20: mol_type = other DNA
gtgcaagggccaaggctgct

SEQ ID NO: 155366 - DNA, 20 bp, synthetic construct
  source 1..20: mol_type = other DNA
tgtgcaagggccaaggctgc

SEQ ID NO: 155367 - DNA, 20 bp, synthetic construct
  source 1..20: mol_type = other DNA
atgtgcaagggccaaggctg

SEQ ID NO: 155368 - DNA, 20 bp, synthetic construct
  source 1..20: mol_type = other DNA
tatgtgcaagggccaaggct

SEQ ID NO: 155369 - DNA, 20 bp, synthetic construct
  source 1..20: mol_type = other DNA
ttatgtgcaagggccaaggc

SEQ ID NO: 155370 - DNA, 20 bp, synthetic construct
  source 1..20: mol_type = other DNA
cttatgtgcaagggccaagg

SEQ ID NO: 155371 - DNA, 20 bp, synthetic construct
  source 1..20: mol_type = other DNA
tcttatgtgcaagggccaag

SEQ ID NO: 155372 - DNA, 20 bp, synthetic construct
  source 1..20: mol_type = other DNA
atcttatgtgcaagggccaa

SEQ ID NO: 155373 - DNA, 20 bp, synthetic construct
  source 1..20: mol_type = other DNA
catcttatgtgcaagggcca

SEQ ID NO: 155374 - DNA, 20 bp, synthetic construct
  source 1..20: mol_type = other DNA
gcatcttatgtgcaagggcc

SEQ ID NO: 155375 - DNA, 20 bp, synthetic construct
  source 1..20: mol_type = other DNA
agcatcttatgtgcaagggc

SEQ ID NO: 155376 - DNA, 20 bp, synthetic construct
  source 1..20: mol_type = other DNA
cagcatcttatgtgcaaggg

SEQ ID NO: 155377 - DNA, 20 bp, synthetic construct
  source 1..20: mol_type = other DNA
acagcatcttatgtgcaagg

SEQ ID NO: 155378 - DNA, 20 bp, synthetic construct
  source 1..20: mol_type = other DNA
aacagcatcttatgtgcaag

SEQ ID NO: 155379 - DNA, 20 bp, synthetic construct
  source 1..20: mol_type = other DNA
caacagcatcttatgtgcaa

SEQ ID NO: 155380 - DNA, 20 bp, synthetic construct
  source 1..20: mol_type = other DNA
tcaacagcatcttatgtgca

SEQ ID NO: 155381 - DNA, 20 bp, synthetic construct
  source 1..20: mol_type = other DNA
ttcaacagcatcttatgtgc

SEQ ID NO: 155382 - DNA, 20 bp, synthetic construct
  source 1..20: mol_type = other DNA
attcaacagcatcttatgtg

SEQ ID NO: 155383 - DNA, 20 bp, synthetic construct
  source 1..20: mol_type = other DNA
tattcaacagcatcttatgt

SEQ ID NO: 155384 - DNA, 20 bp, synthetic construct
  source 1..20: mol_type = other DNA
atattcaacagcatcttatg

SEQ ID NO: 155385 - DNA, 20 bp, synthetic construct
  source 1..20: mol_type = other DNA
aatattcaacagcatcttat

SEQ ID NO: 155386 - DNA, 20 bp, synthetic construct
  source 1..20: mol_type = other DNA
gaatattcaacagcatctta

SEQ ID NO: 155387 - DNA, 20 bp, synthetic construct
  source 1..20: mol_type = other DNA
agaatattcaacagcatctt

SEQ ID NO: 155388 - DNA, 20 bp, synthetic construct
  source 1..20: mol_type = other DNA
cagaatattcaacagcatct

SEQ ID NO: 155389 - DNA, 20 bp, synthetic construct
  source 1..20: mol_type = other DNA
gcagaatattcaacagcatc

SEQ ID NO: 155390 - DNA, 20 bp, synthetic construct
  source 1..20: mol_type = other DNA
ggcagaatattcaacagcat

SEQ ID NO: 155391 - DNA, 20 bp, synthetic construct
  source 1..20: mol_type = other DNA
aggcagaatattcaacagca

SEQ ID NO: 155392 - DNA, 20 bp, synthetic construct
  source 1..20: mol_type = other DNA
caggcagaatattcaacagc

SEQ ID NO: 155393 - DNA, 20 bp, synthetic construct
  source 1..20: mol_type = other DNA
gcaggcagaatattcaacag

SEQ ID NO: 155394 - DNA, 20 bp, synthetic construct
  source 1..20: mol_type = other DNA
tgcaggcagaatattcaaca

SEQ ID NO: 155395 - DNA, 20 bp, synthetic construct
  source 1..20: mol_type = other DNA
gtgcaggcagaatattcaac

SEQ ID NO: 155396 - DNA, 20 bp, synthetic construct
  source 1..20: mol_type = other DNA
ggtgcaggcagaatattcaa

SEQ ID NO: 155397 - DNA, 20 bp, synthetic construct
  source 1..20: mol_type = other DNA
tggtgcaggcagaatattca

SEQ ID NO: 155398 - DNA, 20 bp, synthetic construct
  source 1..20: mol_type = other DNA
ttggtgcaggcagaatattc

SEQ ID NO: 155399 - DNA, 20 bp, synthetic construct
  source 1..20: mol_type = other DNA
cttggtgcaggcagaatatt

SEQ ID NO: 155400 - DNA, 20 bp, synthetic construct
  source 1..20: mol_type = other DNA
acttggtgcaggcagaatat

SEQ ID NO: 155401 - DNA, 20 bp, synthetic construct
  source 1..20: mol_type = other DNA
tacttggtgcaggcagaata

SEQ ID NO: 155402 - DNA, 20 bp, synthetic construct
  source 1..20: mol_type = other DNA
ttacttggtgcaggcagaat

SEQ ID NO: 155403 - DNA, 20 bp, synthetic construct
  source 1..20: mol_type = other DNA
tttacttggtgcaggcagaa

SEQ ID NO: 155404 - DNA, 20 bp, synthetic construct
  source 1..20: mol_type = other DNA
ctttacttggtgcaggcaga

SEQ ID NO: 155405 - DNA, 20 bp, synthetic construct
  source 1..20: mol_type = other DNA
cctttacttggtgcaggcag

SEQ ID NO: 155406 - DNA, 20 bp, synthetic construct
  source 1..20: mol_type = other DNA
ccctttacttggtgcaggca

SEQ ID NO: 155407 - DNA, 20 bp, synthetic construct
  source 1..20: mol_type = other DNA
gccctttacttggtgcaggc

SEQ ID NO: 155408 - DNA, 20 bp, synthetic construct
  source 1..20: mol_type = other DNA
tgccctttacttggtgcagg

SEQ ID NO: 155409 - DNA, 20 bp, synthetic construct
  source 1..20: mol_type = other DNA
gtgccctttacttggtgcag

SEQ ID NO: 155410 - DNA, 20 bp, synthetic construct
  source 1..20: mol_type = other DNA
tgtgccctttacttggtgca

SEQ ID NO: 155411 - DNA, 20 bp, synthetic construct
  source 1..20: mol_type = other DNA
ctgtgccctttacttggtgc

SEQ ID NO: 155412 - DNA, 20 bp, synthetic construct
  source 1..20: mol_type = other DNA
tctgtgccctttacttggtg

SEQ ID NO: 155413 - DNA, 20 bp, synthetic construct
  source 1..20: mol_type = other DNA
atctgtgccctttacttggt

SEQ ID NO: 155414 - DNA, 20 bp, synthetic construct
  source 1..20: mol_type = other DNA
tatctgtgccctttacttgg

SEQ ID NO: 155415 - DNA, 20 bp, synthetic construct
  source 1..20: mol_type = other DNA
ctatctgtgccctttacttg

SEQ ID NO: 155416 - DNA, 20 bp, synthetic construct
  source 1..20: mol_type = other DNA
tctatctgtgccctttactt

SEQ ID NO: 155417 - DNA, 20 bp, synthetic construct
  source 1..20: mol_type = other DNA
ttctatctgtgccctttact

SEQ ID NO: 155418 - DNA, 20 bp, synthetic construct
  source 1..20: mol_type = other DNA
gttctatctgtgccctttac

SEQ ID NO: 155419 - DNA, 20 bp, synthetic construct
  source 1..20: mol_type = other DNA
agttctatctgtgcccttta

SEQ ID NO: 155420 - DNA, 20 bp, synthetic construct
  source 1..20: mol_type = other DNA
cagttctatctgtgcccttt

SEQ ID NO: 155421 - DNA, 20 bp, synthetic construct
  source 1..20: mol_type = other DNA
gcagttctatctgtgccctt

SEQ ID NO: 155422 - DNA, 20 bp, synthetic construct
  source 1..20: mol_type = other DNA
agcagttctatctgtgccct

SEQ ID NO: 155423 - DNA, 20 bp, synthetic construct
  source 1..20: mol_type = other DNA
aagcagttctatctgtgccc

SEQ ID NO: 155424 - DNA, 20 bp, synthetic construct
  source 1..20: mol_type = other DNA
caagcagttctatctgtgcc

SEQ ID NO: 155425 - DNA, 20 bp, synthetic construct
  source 1..20: mol_type = other DNA
ccaagcagttctatctgtgc

SEQ ID NO: 155426 - DNA, 20 bp, synthetic construct
  source 1..20: mol_type = other DNA
gccaagcagttctatctgtg

SEQ ID NO: 155427 - DNA, 20 bp, synthetic construct
  source 1..20: mol_type = other DNA
tgccaagcagttctatctgt

SEQ ID NO: 155428 - DNA, 20 bp, synthetic construct
  source 1..20: mol_type = other DNA
atgccaagcagttctatctg

SEQ ID NO: 155429 - DNA, 20 bp, synthetic construct
  source 1..20: mol_type = other DNA
tatgccaagcagttctatct

SEQ ID NO: 155430 - DNA, 20 bp, synthetic construct
  source 1..20: mol_type = other DNA
atatgccaagcagttctatc

SEQ ID NO: 155431 - DNA, 20 bp, synthetic construct
  source 1..20: mol_type = other DNA
catatgccaagcagttctat

SEQ ID NO: 155432 - DNA, 20 bp, synthetic construct
  source 1..20: mol_type = other DNA
acatatgccaagcagttcta

SEQ ID NO: 155433 - DNA, 20 bp, synthetic construct
  source 1..20: mol_type = other DNA
aacatatgccaagcagttct

SEQ ID NO: 155434 - DNA, 20 bp, synthetic construct
  source 1..20: mol_type = other DNA
caacatatgccaagcagttc

SEQ ID NO: 155435 - DNA, 20 bp, synthetic construct
  source 1..20: mol_type = other DNA
gcaacatatgccaagcagtt

SEQ ID NO: 155436 - DNA, 20 bp, synthetic construct
  source 1..20: mol_type = other DNA
agcaacatatgccaagcagt

SEQ ID NO: 155437 - DNA, 20 bp, synthetic construct
  source 1..20: mol_type = other DNA
cagcaacatatgccaagcag

SEQ ID NO: 155438 - DNA, 20 bp, synthetic construct
  source 1..20: mol_type = other DNA
ccagcaacatatgccaagca

SEQ ID NO: 155439 - DNA, 20 bp, synthetic construct
  source 1..20: mol_type = other DNA
cccagcaacatatgccaagc

SEQ ID NO: 155440 - DNA, 20 bp, synthetic construct
  source 1..20: mol_type = other DNA
ccccagcaacatatgccaag

SEQ ID NO: 155441 - DNA, 20 bp, synthetic construct
  source 1..20: mol_type = other DNA
tccccagcaacatatgccaa

SEQ ID NO: 155442 - DNA, 20 bp, synthetic construct
  source 1..20: mol_type = other DNA
ctccccagcaacatatgcca

SEQ ID NO: 155443 - DNA, 20 bp, synthetic construct
  source 1..20: mol_type = other DNA
tctccccagcaacatatgcc

SEQ ID NO: 155444 - DNA, 20 bp, synthetic construct
  source 1..20: mol_type = other DNA
atctccccagcaacatatgc

SEQ ID NO: 155445 - DNA, 20 bp, synthetic construct
  source 1..20: mol_type = other DNA
catctccccagcaacatatg

SEQ ID NO: 155446 - DNA, 20 bp, synthetic construct
  source 1..20: mol_type = other DNA
tcatctccccagcaacatat

SEQ ID NO: 155447 - DNA, 20 bp, synthetic construct
  source 1..20: mol_type = other DNA
ctcatctccccagcaacata

SEQ ID NO: 155448 - DNA, 20 bp, synthetic construct
  source 1..20: mol_type = other DNA
actcatctccccagcaacat

SEQ ID NO: 155449 - DNA, 20 bp, synthetic construct
  source 1..20: mol_type = other DNA
aactcatctccccagcaaca

SEQ ID NO: 155450 - DNA, 20 bp, synthetic construct
  source 1..20: mol_type = other DNA
aaactcatctccccagcaac

SEQ ID NO: 155451 - DNA, 20 bp, synthetic construct
  source 1..20: mol_type = other DNA
aaaactcatctccccagcaa

SEQ ID NO: 155452 - DNA, 20 bp, synthetic construct
  source 1..20: mol_type = other DNA
aaaaactcatctccccagca

SEQ ID NO: 155453 - DNA, 20 bp, synthetic construct
  source 1..20: mol_type = other DNA
aaaaaactcatctccccagc

SEQ ID NO: 155454 - DNA, 20 bp, synthetic construct
  source 1..20: mol_type = other DNA
caaaaaactcatctccccag

SEQ ID NO: 155455 - DNA, 20 bp, synthetic construct
  source 1..20: mol_type = other DNA
acaaaaaactcatctcccca

SEQ ID NO: 155456 - DNA, 20 bp, synthetic construct
  source 1..20: mol_type = other DNA
tacaaaaaactcatctcccc

SEQ ID NO: 155457 - DNA, 20 bp, synthetic construct
  source 1..20: mol_type = other DNA
ttacaaaaaactcatctccc

SEQ ID NO: 155458 - DNA, 20 bp, synthetic construct
  source 1..20: mol_type = other DNA
tttacaaaaaactcatctcc

SEQ ID NO: 155459 - DNA, 20 bp, synthetic construct
  source 1..20: mol_type = other DNA
ctttacaaaaaactcatctc

SEQ ID NO: 155460 - DNA, 20 bp, synthetic construct
  source 1..20: mol_type = other DNA
actttacaaaaaactcatct

SEQ ID NO: 155461 - DNA, 20 bp, synthetic construct
  source 1..20: mol_type = other DNA
tactttacaaaaaactcatc

SEQ ID NO: 155462 - DNA, 20 bp, synthetic construct
  source 1..20: mol_type = other DNA
atactttacaaaaaactcat

SEQ ID NO: 155463 - DNA, 20 bp, synthetic construct
  source 1..20: mol_type = other DNA
tatactttacaaaaaactca

SEQ ID NO: 155464 - DNA, 20 bp, synthetic construct
  source 1..20: mol_type = other DNA
gtatactttacaaaaaactc

SEQ ID NO: 155465 - DNA, 20 bp, synthetic construct
  source 1..20: mol_type = other DNA
agtatactttacaaaaaact

SEQ ID NO: 155466 - DNA, 20 bp, synthetic construct
  source 1..20: mol_type = other DNA
tagtatactttacaaaaaac

SEQ ID NO: 155467 - DNA, 20 bp, synthetic construct
  source 1..20: mol_type = other DNA
gtagtatactttacaaaaaa

SEQ ID NO: 155468 - DNA, 20 bp, synthetic construct
  source 1..20: mol_type = other DNA
cgtagtatactttacaaaaa

SEQ ID NO: 155469 - DNA, 20 bp, synthetic construct
  source 1..20: mol_type = other DNA
acgtagtatactttacaaaa

SEQ ID NO: 155470 - DNA, 20 bp, synthetic construct
  source 1..20: mol_type = other DNA
aacgtagtatactttacaaa

SEQ ID NO: 155471 - DNA, 20 bp, synthetic construct
  source 1..20: mol_type = other DNA
gaacgtagtatactttacaa

SEQ ID NO: 155472 - DNA, 20 bp, synthetic construct
  source 1..20: mol_type = other DNA
agaacgtagtatactttaca

SEQ ID NO: 155473 - DNA, 20 bp, synthetic construct
  source 1..20: mol_type = other DNA
aagaacgtagtatactttac

SEQ ID NO: 155474 - DNA, 20 bp, synthetic construct
  source 1..20: mol_type = other DNA
taagaacgtagtatacttta

SEQ ID NO: 155475 - DNA, 20 bp, synthetic construct
  source 1..20: mol_type = other DNA
ttaagaacgtagtatacttt

SEQ ID NO: 155476 - DNA, 20 bp, synthetic construct
  source 1..20: mol_type = other DNA
cttaagaacgtagtatactt

SEQ ID NO: 155477 - DNA, 20 bp, synthetic construct
  source 1..20: mol_type = other DNA
tcttaagaacgtagtatact

SEQ ID NO: 155478 - DNA, 20 bp, synthetic construct
  source 1..20: mol_type = other DNA
ttcttaagaacgtagtatac

SEQ ID NO: 155479 - DNA, 20 bp, synthetic construct
  source 1..20: mol_type = other DNA
attcttaagaacgtagtata

SEQ ID NO: 155480 - DNA, 20 bp, synthetic construct
  source 1..20: mol_type = other DNA
aattcttaagaacgtagtat

SEQ ID NO: 155481 - DNA, 20 bp, synthetic construct
  source 1..20: mol_type = other DNA
aaattcttaagaacgtagta

SEQ ID NO: 155482 - DNA, 20 bp, synthetic construct
  source 1..20: mol_type = other DNA
caaattcttaagaacgtagt

SEQ ID NO: 155483 - DNA, 20 bp, synthetic construct
  source 1..20: mol_type = other DNA
ccaaattcttaagaacgtag

SEQ ID NO: 155484 - DNA, 20 bp, synthetic construct
  source 1..20: mol_type = other DNA
tccaaattcttaagaacgta

SEQ ID NO: 155485 - DNA, 20 bp, synthetic construct
  source 1..20: mol_type = other DNA
atccaaattcttaagaacgt

SEQ ID NO: 155486 - DNA, 20 bp, synthetic construct
  source 1..20: mol_type = other DNA
gatccaaattcttaagaacg

SEQ ID NO: 155487 - DNA, 20 bp, synthetic construct
  source 1..20: mol_type = other DNA
tgatccaaattcttaagaac

SEQ ID NO: 155488 - DNA, 20 bp, synthetic construct
  source 1..20: mol_type = other DNA
atgatccaaattcttaagaa

SEQ ID NO: 155489 - DNA, 20 bp, synthetic construct
  source 1..20: mol_type = other DNA
tatgatccaaattcttaaga

SEQ ID NO: 155490 - DNA, 20 bp, synthetic construct
  source 1..20: mol_type = other DNA
ttatgatccaaattcttaag

SEQ ID NO: 155491 - DNA, 20 bp, synthetic construct
  source 1..20: mol_type = other DNA
gttatgatccaaattcttaa

SEQ ID NO: 155492 - DNA, 20 bp, synthetic construct
  source 1..20: mol_type = other DNA
ggttatgatccaaattctta

SEQ ID NO: 155493 - DNA, 20 bp, synthetic construct
  source 1..20: mol_type = other DNA
tggttatgatccaaattctt

SEQ ID NO: 155494 - DNA, 20 bp, synthetic construct
  source 1..20: mol_type = other DNA
atggttatgatccaaattct

SEQ ID NO: 155495 - DNA, 20 bp, synthetic construct
  source 1..20: mol_type = other DNA
catggttatgatccaaattc

SEQ ID NO: 155496 - DNA, 20 bp, synthetic construct
  source 1..20: mol_type = other DNA
ccatggttatgatccaaatt

SEQ ID NO: 155497 - DNA, 20 bp, synthetic construct
  source 1..20: mol_type = other DNA
cccatggttatgatccaaat

SEQ ID NO: 155498 - DNA, 20 bp, synthetic construct
  source 1..20: mol_type = other DNA
tcccatggttatgatccaaa

SEQ ID NO: 155499 - DNA, 20 bp, synthetic construct
  source 1..20: mol_type = other DNA
atcccatggttatgatccaa

SEQ ID NO: 155500 - DNA, 20 bp, synthetic construct
  source 1..20: mol_type = other DNA
aatcccatggttatgatcca

SEQ ID NO: 155501 - DNA, 20 bp, synthetic construct
  source 1..20: mol_type = other DNA
aaatcccatggttatgatcc

SEQ ID NO: 155502 - DNA, 20 bp, synthetic construct
  source 1..20: mol_type = other DNA
aaaatcccatggttatgatc

SEQ ID NO: 155503 - DNA, 20 bp, synthetic construct
  source 1..20: mol_type = other DNA
taaaatcccatggttatgat

SEQ ID NO: 155504 - DNA, 20 bp, synthetic construct
  source 1..20: mol_type = other DNA
ttaaaatcccatggttatga

SEQ ID NO: 155505 - DNA, 20 bp, synthetic construct
  source 1..20: mol_type = other DNA
attaaaatcccatggttatg

SEQ ID NO: 155506 - DNA, 20 bp, synthetic construct
  source 1..20: mol_type = other DNA
tattaaaatcccatggttat

SEQ ID NO: 155507 - DNA, 20 bp, synthetic construct
  source 1..20: mol_type = other DNA
ttattaaaatcccatggtta

SEQ ID NO: 155508 - DNA, 20 bp, synthetic construct
  source 1..20: mol_type = other DNA
attattaaaatcccatggtt

SEQ ID NO: 155509 - DNA, 20 bp, synthetic construct
  source 1..20: mol_type = other DNA
tattattaaaatcccatggt

SEQ ID NO: 155510 - DNA, 20 bp, synthetic construct
  source 1..20: mol_type = other DNA
ctattattaaaatcccatgg

SEQ ID NO: 155511 - DNA, 20 bp, synthetic construct
  source 1..20: mol_type = other DNA
tctattattaaaatcccatg

SEQ ID NO: 155512 - DNA, 20 bp, synthetic construct
  source 1..20: mol_type = other DNA
ttctattattaaaatcccat

SEQ ID NO: 155513 - DNA, 20 bp, synthetic construct
  source 1..20: mol_type = other DNA
tttctattattaaaatccca

SEQ ID NO: 155514 - DNA, 20 bp, synthetic construct
  source 1..20: mol_type = other DNA
ttttctattattaaaatccc

SEQ ID NO: 155515 - DNA, 20 bp, synthetic construct
  source 1..20: mol_type = other DNA
tttttctattattaaaatcc

SEQ ID NO: 155516 - DNA, 20 bp, synthetic construct
  source 1..20: mol_type = other DNA
gtttttctattattaaaatc

SEQ ID NO: 155517 - DNA, 20 bp, synthetic construct
  source 1..20: mol_type = other DNA
agtttttctattattaaaat

SEQ ID NO: 155518 - DNA, 20 bp, synthetic construct
  source 1..20: mol_type = other DNA
cagtttttctattattaaaa

SEQ ID NO: 155519 - DNA, 20 bp, synthetic construct
  source 1..20: mol_type = other DNA
acagtttttctattattaaa

SEQ ID NO: 155520 - DNA, 20 bp, synthetic construct
  source 1..20: mol_type = other DNA
aacagtttttctattattaa

SEQ ID NO: 155521 - DNA, 20 bp, synthetic construct
  source 1..20: mol_type = other DNA
caacagtttttctattatta

SEQ ID NO: 155522 - DNA, 20 bp, synthetic construct
  source 1..20: mol_type = other DNA
tcaacagtttttctattatt

SEQ ID NO: 155523 - DNA, 20 bp, synthetic construct
  source 1..20: mol_type = other DNA
ttcaacagtttttctattat

SEQ ID NO: 155524 - DNA, 20 bp, synthetic construct
  source 1..20: mol_type = other DNA
cttcaacagtttttctatta

SEQ ID NO: 155525 - DNA, 20 bp, synthetic construct
  source 1..20: mol_type = other DNA
tcttcaacagtttttctatt

SEQ ID NO: 155526 - DNA, 20 bp, synthetic construct
  source 1..20: mol_type = other DNA
atcttcaacagtttttctat

SEQ ID NO: 155527 - DNA, 20 bp, synthetic construct
  source 1..20: mol_type = other DNA
gatcttcaacagtttttcta

SEQ ID NO: 155528 - DNA, 20 bp, synthetic construct
  source 1..20: mol_type = other DNA
tgatcttcaacagtttttct

SEQ ID NO: 155529 - DNA, 20 bp, synthetic construct
  source 1..20: mol_type = other DNA
ctgatcttcaacagtttttc

SEQ ID NO: 155530 - DNA, 20 bp, synthetic construct
  source 1..20: mol_type = other DNA
actgatcttcaacagttttt

SEQ ID NO: 155531 - DNA, 20 bp, synthetic construct
  source 1..20: mol_type = other DNA
gactgatcttcaacagtttt

SEQ ID NO: 155532 - DNA, 20 bp, synthetic construct
  source 1..20: mol_type = other DNA
agactgatcttcaacagttt

SEQ ID NO: 155533 - DNA, 20 bp, synthetic construct
  source 1..20: mol_type = other DNA
cagactgatcttcaacagtt

SEQ ID NO: 155534 - DNA, 20 bp, synthetic construct
  source 1..20: mol_type = other DNA
ccagactgatcttcaacagt

SEQ ID NO: 155535 - DNA, 20 bp, synthetic construct
  source 1..20: mol_type = other DNA
accagactgatcttcaacag

SEQ ID NO: 155536 - DNA, 20 bp, synthetic construct
  source 1..20: mol_type = other DNA
gaccagactgatcttcaaca

SEQ ID NO: 155537 - DNA, 20 bp, synthetic construct
  source 1..20: mol_type = other DNA
ggaccagactgatcttcaac

SEQ ID NO: 155538 - DNA, 20 bp, synthetic construct
  source 1..20: mol_type = other DNA
gggaccagactgatcttcaa

SEQ ID NO: 155539 - DNA, 20 bp, synthetic construct
  source 1..20: mol_type = other DNA
agggaccagactgatcttca

SEQ ID NO: 155540 - DNA, 20 bp, synthetic construct
  source 1..20: mol_type = other DNA
aagggaccagactgatcttc

SEQ ID NO: 155541 - DNA, 20 bp, synthetic construct
  source 1..20: mol_type = other DNA
taagggaccagactgatctt

SEQ ID NO: 155542 - DNA, 20 bp, synthetic construct
  source 1..20: mol_type = other DNA
ataagggaccagactgatct

SEQ ID NO: 155543 - DNA, 20 bp, synthetic construct
  source 1..20: mol_type = other DNA
aataagggaccagactgatc

SEQ ID NO: 155544 - DNA, 20 bp, synthetic construct
  source 1..20: mol_type = other DNA
aaataagggaccagactgat

SEQ ID NO: 155545 - DNA, 20 bp, synthetic construct
  source 1..20: mol_type = other DNA
aaaataagggaccagactga

SEQ ID NO: 155546 - DNA, 20 bp, synthetic construct
  source 1..20: mol_type = other DNA
aaaaataagggaccagactg

SEQ ID NO: 155547 - DNA, 20 bp, synthetic construct
  source 1..20: mol_type = other DNA
taaaaataagggaccagact

SEQ ID NO: 155548 - DNA, 20 bp, synthetic construct
  source 1..20: mol_type = other DNA
gtaaaaataagggaccagac

SEQ ID NO: 155549 - DNA, 20 bp, synthetic construct
  source 1..20: mol_type = other DNA
tgtaaaaataagggaccaga

SEQ ID NO: 155550 - DNA, 20 bp, synthetic construct
  source 1..20: mol_type = other DNA
ctgtaaaaataagggaccag

SEQ ID NO: 155551 - DNA, 20 bp, synthetic construct
  source 1..20: mol_type = other DNA
actgtaaaaataagggacca

SEQ ID NO: 155552 - DNA, 20 bp, synthetic construct
  source 1..20: mol_type = other DNA
cactgtaaaaataagggacc

SEQ ID NO: 155553 - DNA, 20 bp, synthetic construct
  source 1..20: mol_type = other DNA
tcactgtaaaaataagggac

SEQ ID NO: 155554 - DNA, 20 bp, synthetic construct
  source 1..20: mol_type = other DNA
ttcactgtaaaaataaggga

SEQ ID NO: 155555 - DNA, 20 bp, synthetic construct
  source 1..20: mol_type = other DNA
cttcactgtaaaaataaggg

SEQ ID NO: 155556 - DNA, 20 bp, synthetic construct
  source 1..20: mol_type = other DNA
tcttcactgtaaaaataagg

SEQ ID NO: 155557 - DNA, 20 bp, synthetic construct
  source 1..20: mol_type = other DNA
ttcttcactgtaaaaataag

SEQ ID NO: 155558 - DNA, 20 bp, synthetic construct
  source 1..20: mol_type = other DNA
cttcttcactgtaaaaataa

SEQ ID NO: 155559 - DNA, 20 bp, synthetic construct
  source 1..20: mol_type = other DNA
gcttcttcactgtaaaaata

SEQ ID NO: 155560 - DNA, 20 bp, synthetic construct
  source 1..20: mol_type = other DNA
ggcttcttcactgtaaaaat

SEQ ID NO: 155561 - DNA, 20 bp, synthetic construct
  source 1..20: mol_type = other DNA
tggcttcttcactgtaaaaa

SEQ ID NO: 155562 - DNA, 20 bp, synthetic construct
  source 1..20: mol_type = other DNA
ttggcttcttcactgtaaaa

SEQ ID NO: 155563 - DNA, 20 bp, synthetic construct
  source 1..20: mol_type = other DNA
tttggcttcttcactgtaaa

SEQ ID NO: 155564 - DNA, 20 bp, synthetic construct
  source 1..20: mol_type = other DNA
ctttggcttcttcactgtaa

SEQ ID NO: 155565 - DNA, 20 bp, synthetic construct
  source 1..20: mol_type = other DNA
gctttggcttcttcactgta

SEQ ID NO: 155566 - DNA, 20 bp, synthetic construct
  source 1..20: mol_type = other DNA
ggctttggcttcttcactgt

SEQ ID NO: 155567 - DNA, 20 bp, synthetic construct
  source 1..20: mol_type = other DNA
gggctttggcttcttcactg

SEQ ID NO: 155568 - DNA, 20 bp, synthetic construct
  source 1..20: mol_type = other DNA
tgggctttggcttcttcact

SEQ ID NO: 155569 - DNA, 20 bp, synthetic construct
  source 1..20: mol_type = other DNA
ctgggctttggcttcttcac

SEQ ID NO: 155570 - DNA, 20 bp, synthetic construct
  source 1..20: mol_type = other DNA
tctgggctttggcttcttca

SEQ ID NO: 155571 - DNA, 20 bp, synthetic construct
  source 1..20: mol_type = other DNA
ctctgggctttggcttcttc

SEQ ID NO: 155572 - DNA, 20 bp, synthetic construct
  source 1..20: mol_type = other DNA
tctctgggctttggcttctt

SEQ ID NO: 155573 - DNA, 20 bp, synthetic construct
  source 1..20: mol_type = other DNA
ttctctgggctttggcttct

SEQ ID NO: 155574 - DNA, 20 bp, synthetic construct
  source 1..20: mol_type = other DNA
cttctctgggctttggcttc

SEQ ID NO: 155575 - DNA, 20 bp, synthetic construct
  source 1..20: mol_type = other DNA
ccttctctgggctttggctt

SEQ ID NO: 155576 - DNA, 20 bp, synthetic construct
  source 1..20: mol_type = other DNA
cccttctctgggctttggct

SEQ ID NO: 155577 - DNA, 20 bp, synthetic construct
  source 1..20: mol_type = other DNA
acccttctctgggctttggc

SEQ ID NO: 155578 - DNA, 20 bp, synthetic construct
  source 1..20: mol_type = other DNA
cacccttctctgggctttgg

SEQ ID NO: 155579 - DNA, 20 bp, synthetic construct
  source 1..20: mol_type = other DNA
acacccttctctgggctttg

SEQ ID NO: 155580 - DNA, 20 bp, synthetic construct
  source 1..20: mol_type = other DNA
aacacccttctctgggcttt

SEQ ID NO: 155581 - DNA, 20 bp, synthetic construct
  source 1..20: mol_type = other DNA
taacacccttctctgggctt

SEQ ID NO: 155582 - DNA, 20 bp, synthetic construct
  source 1..20: mol_type = other DNA
ttaacacccttctctgggct

SEQ ID NO: 155583 - DNA, 20 bp, synthetic construct
  source 1..20: mol_type = other DNA
gttaacacccttctctgggc

SEQ ID NO: 155584 - DNA, 20 bp, synthetic construct
  source 1..20: mol_type = other DNA
agttaacacccttctctggg

SEQ ID NO: 155585 - DNA, 20 bp, synthetic construct
  source 1..20: mol_type = other DNA
aagttaacacccttctctgg

SEQ ID NO: 155586 - DNA, 20 bp, synthetic construct
  source 1..20: mol_type = other DNA
aaagttaacacccttctctg

SEQ ID NO: 155587 - DNA, 20 bp, synthetic construct
  source 1..20: mol_type = other DNA
taaagttaacacccttctct

SEQ ID NO: 155588 - DNA, 20 bp, synthetic construct
  source 1..20: mol_type = other DNA
gtaaagttaacacccttctc

SEQ ID NO: 155589 - DNA, 20 bp, synthetic construct
  source 1..20: mol_type = other DNA
tgtaaagttaacacccttct

SEQ ID NO: 155590 - DNA, 20 bp, synthetic construct
  source 1..20: mol_type = other DNA
ttgtaaagttaacacccttc

SEQ ID NO: 155591 - DNA, 20 bp, synthetic construct
  source 1..20: mol_type = other DNA
cttgtaaagttaacaccctt

SEQ ID NO: 155592 - DNA, 20 bp, synthetic construct
  source 1..20: mol_type = other DNA
acttgtaaagttaacaccct

SEQ ID NO: 155593 - DNA, 20 bp, synthetic construct
  source 1..20: mol_type = other DNA
cacttgtaaagttaacaccc

SEQ ID NO: 155594 - DNA, 20 bp, synthetic construct
  source 1..20: mol_type = other DNA
acacttgtaaagttaacacc

SEQ ID NO: 155595 - DNA, 20 bp, synthetic construct
  source 1..20: mol_type = other DNA
gacacttgtaaagttaacac

SEQ ID NO: 155596 - DNA, 20 bp, synthetic construct
  source 1..20: mol_type = other DNA
tgacacttgtaaagttaaca

SEQ ID NO: 155597 - DNA, 20 bp, synthetic construct
  source 1..20: mol_type = other DNA
ctgacacttgtaaagttaac

SEQ ID NO: 155598 - DNA, 20 bp, synthetic construct
  source 1..20: mol_type = other DNA
tctgacacttgtaaagttaa

SEQ ID NO: 155599 - DNA, 20 bp, synthetic construct
  source 1..20: mol_type = other DNA
gtctgacacttgtaaagtta

SEQ ID NO: 155600 - DNA, 20 bp, synthetic construct
  source 1..20: mol_type = other DNA
tgtctgacacttgtaaagtt

SEQ ID NO: 155601 - DNA, 20 bp, synthetic construct
  source 1..20: mol_type = other DNA
ctgtctgacacttgtaaagt

SEQ ID NO: 155602 - DNA, 20 bp, synthetic construct
  source 1..20: mol_type = other DNA
actgtctgacacttgtaaag

SEQ ID NO: 155603 - DNA, 20 bp, synthetic construct
  source 1..20: mol_type = other DNA
tactgtctgacacttgtaaa

SEQ ID NO: 155604 - DNA, 20 bp, synthetic construct
  source 1..20: mol_type = other DNA
ctactgtctgacacttgtaa

SEQ ID NO: 155605 - DNA, 20 bp, synthetic construct
  source 1..20: mol_type = other DNA
actactgtctgacacttgta

SEQ ID NO: 155606 - DNA, 20 bp, synthetic construct
  source 1..20: mol_type = other DNA
aactactgtctgacacttgt

SEQ ID NO: 155607 - DNA, 20 bp, synthetic construct
  source 1..20: mol_type = other DNA
taactactgtctgacacttg

SEQ ID NO: 155608 - DNA, 20 bp, synthetic construct
  source 1..20: mol_type = other DNA
ctaactactgtctgacactt

SEQ ID NO: 155609 - DNA, 20 bp, synthetic construct
  source 1..20: mol_type = other DNA
tctaactactgtctgacact

SEQ ID NO: 155610 - DNA, 20 bp, synthetic construct
  source 1..20: mol_type = other DNA
ttctaactactgtctgacac

SEQ ID NO: 155611 - DNA, 20 bp, synthetic construct
  source 1..20: mol_type = other DNA
gttctaactactgtctgaca

SEQ ID NO: 155612 - DNA, 20 bp, synthetic construct
  source 1..20: mol_type = other DNA
agttctaactactgtctgac

SEQ ID NO: 155613 - DNA, 20 bp, synthetic construct
  source 1..20: mol_type = other DNA
aagttctaactactgtctga

SEQ ID NO: 155614 - DNA, 20 bp, synthetic construct
  source 1..20: mol_type = other DNA
caagttctaactactgtctg

SEQ ID NO: 155615 - DNA, 20 bp, synthetic construct
  source 1..20: mol_type = other DNA
ccaagttctaactactgtct

SEQ ID NO: 155616 - DNA, 20 bp, synthetic construct
  source 1..20: mol_type = other DNA
accaagttctaactactgtc

SEQ ID NO: 155617 - DNA, 20 bp, synthetic construct
  source 1..20: mol_type = other DNA
caccaagttctaactactgt

SEQ ID NO: 155618 - DNA, 20 bp, synthetic construct
  source 1..20: mol_type = other DNA
ccaccaagttctaactactg

SEQ ID NO: 155619 - DNA, 20 bp, synthetic construct
  source 1..20: mol_type = other DNA
cccaccaagttctaactact

SEQ ID NO: 155620 - DNA, 20 bp, synthetic construct
  source 1..20: mol_type = other DNA
ccccaccaagttctaactac

SEQ ID NO: 155621 - DNA, 20 bp, synthetic construct
  source 1..20: mol_type = other DNA
accccaccaagttctaacta

SEQ ID NO: 155622 - DNA, 20 bp, synthetic construct
  source 1..20: mol_type = other DNA
aaccccaccaagttctaact

SEQ ID NO: 155623 - DNA, 20 bp, synthetic construct
  source 1..20: mol_type = other DNA
aaaccccaccaagttctaac

SEQ ID NO: 155624 - DNA, 20 bp, synthetic construct
  source 1..20: mol_type = other DNA
aaaaccccaccaagttctaa

SEQ ID NO: 155625 - DNA, 20 bp, synthetic construct
  source 1..20: mol_type = other DNA
aaaaaccccaccaagttcta

SEQ ID NO: 155626 - DNA, 20 bp, synthetic construct
  source 1..20: mol_type = other DNA
aaaaaaccccaccaagttct

SEQ ID NO: 155627 - DNA, 20 bp, synthetic construct
  source 1..20: mol_type = other DNA
aaaaaaaccccaccaagttc

SEQ ID NO: 155628 - DNA, 20 bp, synthetic construct
  source 1..20: mol_type = other DNA
aaaaaaaaccccaccaagtt

SEQ ID NO: 155629 - DNA, 20 bp, synthetic construct
  source 1..20: mol_type = other DNA
aaaaaaaaaccccaccaagt

SEQ ID NO: 155630 - DNA, 20 bp, synthetic construct
  source 1..20: mol_type = other DNA
aaaaaaaaaaccccaccaag

SEQ ID NO: 155631 - DNA, 20 bp, synthetic construct
  source 1..20: mol_type = other DNA
aaaaaaaaaaaccccaccaa

SEQ ID NO: 155632 - DNA, 20 bp, synthetic construct
  source 1..20: mol_type = other DNA
aaaaaaaaaaaaccccacca

SEQ ID NO: 155633 - DNA, 20 bp, synthetic construct
  source 1..20: mol_type = other DNA
aaaaaaaaaaaaaccccacc

SEQ ID NO: 155634 - DNA, 20 bp, synthetic construct
  source 1..20: mol_type = other DNA
aaaaaaaaaaaaaaccccac

SEQ ID NO: 155635 - DNA, 20 bp, synthetic construct
  source 1..20: mol_type = other DNA
aaaaaaaaaaaaaaacccca

SEQ ID NO: 155636 - DNA, 20 bp, synthetic construct
  source 1..20: mol_type = other DNA
aaaaaaaaaaaaaaaacccc

SEQ ID NO: 155637 - DNA, 20 bp, synthetic construct
  source 1..20: mol_type = other DNA
aaaaaaaaaaaaaaaaaccc

SEQ ID NO: 155638 - DNA, 20 bp, synthetic construct
  source 1..20: mol_type = other DNA
aaaaaaaaaaaaaaaaaacc

SEQ ID NO: 155639 - DNA, 20 bp, synthetic construct
  source 1..20: mol_type = other DNA
aaaaaaaaaaaaaaaaaaac

SEQ ID NO: 155640 - DNA, 20 bp, synthetic construct
  source 1..20: mol_type = other DNA
caaaaaaaaaaaaaaaaaaa

SEQ ID NO: 155641 - DNA, 20 bp, synthetic construct
  source 1..20: mol_type = other DNA
tcaaaaaaaaaaaaaaaaaa

SEQ ID NO: 155642 - DNA, 20 bp, synthetic construct
  source 1..20: mol_type = other DNA
ctcaaaaaaaaaaaaaaaaa

SEQ ID NO: 155643 - DNA, 20 bp, synthetic construct
  source 1..20: mol_type = other DNA
tctcaaaaaaaaaaaaaaaa

SEQ ID NO: 155644 - DNA, 20 bp, synthetic construct
  source 1..20: mol_type = other DNA
atctcaaaaaaaaaaaaaaa

SEQ ID NO: 155645 - DNA, 20 bp, synthetic construct
  source 1..20: mol_type = other DNA
catctcaaaaaaaaaaaaaa

SEQ ID NO: 155646 - DNA, 20 bp, synthetic construct
  source 1..20: mol_type = other DNA
ccatctcaaaaaaaaaaaaa

SEQ ID NO: 155647 - DNA, 20 bp, synthetic construct
  source 1..20: mol_type = other DNA
tccatctcaaaaaaaaaaaa

SEQ ID NO: 155648 - DNA, 20 bp, synthetic construct
  source 1..20: mol_type = other DNA
ctccatctcaaaaaaaaaaa

SEQ ID NO: 155649 - DNA, 20 bp, synthetic construct
  source 1..20: mol_type = other DNA
actccatctcaaaaaaaaaa

SEQ ID NO: 155650 - DNA, 20 bp, synthetic construct
  source 1..20: mol_type = other DNA
gactccatctcaaaaaaaaa

SEQ ID NO: 155651 - DNA, 20 bp, synthetic construct
  source 1..20: mol_type = other DNA
agactccatctcaaaaaaaa

SEQ ID NO: 155652 - DNA, 20 bp, synthetic construct
  source 1..20: mol_type = other DNA
aagactccatctcaaaaaaa

SEQ ID NO: 155653 - DNA, 20 bp, synthetic construct
  source 1..20: mol_type = other DNA
caagactccatctcaaaaaa

SEQ ID NO: 155654 - DNA, 20 bp, synthetic construct
  source 1..20: mol_type = other DNA
gcaagactccatctcaaaaa

SEQ ID NO: 155655 - DNA, 20 bp, synthetic construct
  source 1..20: mol_type = other DNA
agcaagactccatctcaaaa

SEQ ID NO: 155656 - DNA, 20 bp, synthetic construct
  source 1..20: mol_type = other DNA
gagcaagactccatctcaaa

SEQ ID NO: 155657 - DNA, 20 bp, synthetic construct
  source 1..20: mol_type = other DNA
agagcaagactccatctcaa

SEQ ID NO: 155658 - DNA, 20 bp, synthetic construct
  source 1..20: mol_type = other DNA
cagagcaagactccatctca

SEQ ID NO: 155659 - DNA, 20 bp, synthetic construct
  source 1..20: mol_type = other DNA
acagagcaagactccatctc

SEQ ID NO: 155660 - DNA, 20 bp, synthetic construct
  source 1..20: mol_type = other DNA
aacagagcaagactccatct

SEQ ID NO: 155661 - DNA, 20 bp, synthetic construct
  source 1..20: mol_type = other DNA
caacagagcaagactccatc

SEQ ID NO: 155662 - DNA, 20 bp, synthetic construct
  source 1..20: mol_type = other DNA
gcaacagagcaagactccat

SEQ ID NO: 155663 - DNA, 20 bp, synthetic construct
  source 1..20: mol_type = other DNA
ggcaacagagcaagactcca

SEQ ID NO: 155664 - DNA, 20 bp, synthetic construct
  source 1..20: mol_type = other DNA
gggcaacagagcaagactcc

SEQ ID NO: 155665 - DNA, 20 bp, synthetic construct
  source 1..20: mol_type = other DNA
tgggcaacagagcaagactc

SEQ ID NO: 155666 - DNA, 20 bp, synthetic construct
  source 1..20: mol_type = other DNA
ctgggcaacagagcaagact

SEQ ID NO: 155667 - DNA, 20 bp, synthetic construct
  source 1..20: mol_type = other DNA
cctgggcaacagagcaagac

SEQ ID NO: 155668 - DNA, 20 bp, synthetic construct
  source 1..20: mol_type = other DNA
gcctgggcaacagagcaaga

SEQ ID NO: 155669 - DNA, 20 bp, synthetic construct
  source 1..20: mol_type = other DNA
agcctgggcaacagagcaag

SEQ ID NO: 155670 - DNA, 20 bp, synthetic construct
  source 1..20: mol_type = other DNA
cagcctgggcaacagagcaa

SEQ ID NO: 155671 - DNA, 20 bp, synthetic construct
  source 1..20: mol_type = other DNA
ccagcctgggcaacagagca

SEQ ID NO: 155672 - DNA, 20 bp, synthetic construct
  source 1..20: mol_type = other DNA
tccagcctgggcaacagagc

SEQ ID NO: 155673 - DNA, 20 bp, synthetic construct
  source 1..20: mol_type = other DNA
ctccagcctgggcaacagag

SEQ ID NO: 155674 - DNA, 20 bp, synthetic construct
  source 1..20: mol_type = other DNA
actccagcctgggcaacaga

SEQ ID NO: 155675 - DNA, 20 bp, synthetic construct
  source 1..20: mol_type = other DNA
cactccagcctgggcaacag

SEQ ID NO: 155676 - DNA, 20 bp, synthetic construct
  source 1..20: mol_type = other DNA
gcactccagcctgggcaaca

SEQ ID NO: 155677 - DNA, 20 bp, synthetic construct
  source 1..20: mol_type = other DNA
tgcactccagcctgggcaac

SEQ ID NO: 155678 - DNA, 20 bp, synthetic construct
  source 1..20: mol_type = other DNA
ctgcactccagcctgggcaa

SEQ ID NO: 155679 - DNA, 20 bp, synthetic construct
  source 1..20: mol_type = other DNA
actgcactccagcctgggca

SEQ ID NO: 155680 - DNA, 20 bp, synthetic construct
  source 1..20: mol_type = other DNA
cactgcactccagcctgggc

SEQ ID NO: 155681 - DNA, 20 bp, synthetic construct
  source 1..20: mol_type = other DNA
ccactgcactccagcctggg

SEQ ID NO: 155682 - DNA, 20 bp, synthetic construct
  source 1..20: mol_type = other DNA
accactgcactccagcctgg

SEQ ID NO: 155683 - DNA, 20 bp, synthetic construct
  source 1..20: mol_type = other DNA
caccactgcactccagcctg

SEQ ID NO: 155684 - DNA, 20 bp, synthetic construct
  source 1..20: mol_type = other DNA
gcaccactgcactccagcct

SEQ ID NO: 155685 - DNA, 20 bp, synthetic construct
  source 1..20: mol_type = other DNA
cgcaccactgcactccagcc

SEQ ID NO: 155686 - DNA, 20 bp, synthetic construct
  source 1..20: mol_type = other DNA
tcgcaccactgcactccagc

SEQ ID NO: 155687 - DNA, 20 bp, synthetic construct
  source 1..20: mol_type = other DNA
atcgcaccactgcactccag

SEQ ID NO: 155688 - DNA, 20 bp, synthetic construct
  source 1..20: mol_type = other DNA
gatcgcaccactgcactcca

SEQ ID NO: 155689 - DNA, 20 bp, synthetic construct
  source 1..20: mol_type = other DNA
agatcgcaccactgcactcc

SEQ ID NO: 155690 - DNA, 20 bp, synthetic construct
  source 1..20: mol_type = other DNA
gagatcgcaccactgcactc

SEQ ID NO: 155691 - DNA, 20 bp, synthetic construct
  source 1..20: mol_type = other DNA
tgagatcgcaccactgcact

SEQ ID NO: 155692 - DNA, 20 bp, synthetic construct
  source 1..20: mol_type = other DNA
ctgagatcgcaccactgcac

SEQ ID NO: 155693 - DNA, 20 bp, synthetic construct
  source 1..20: mol_type = other DNA
gctgagatcgcaccactgca

SEQ ID NO: 155694 - DNA, 20 bp, synthetic construct
  source 1..20: mol_type = other DNA
agctgagatcgcaccactgc

SEQ ID NO: 155695 - DNA, 20 bp, synthetic construct
  source 1..20: mol_type = other DNA
gagctgagatcgcaccactg

SEQ ID NO: 155696 - DNA, 20 bp, synthetic construct
  source 1..20: mol_type = other DNA
tgagctgagatcgcaccact

SEQ ID NO: 155697 - DNA, 20 bp, synthetic construct
  source 1..20: mol_type = other DNA
gtgagctgagatcgcaccac

SEQ ID NO: 155698 - DNA, 20 bp, synthetic construct
  source 1..20: mol_type = other DNA
agtgagctgagatcgcacca

SEQ ID NO: 155699 - DNA, 20 bp, synthetic construct
  source 1..20: mol_type = other DNA
cagtgagctgagatcgcacc

SEQ ID NO: 155700 - DNA, 20 bp, synthetic construct
  source 1..20: mol_type = other DNA
gcagtgagctgagatcgcac

SEQ ID NO: 155701 - DNA, 20 bp, synthetic construct
  source 1..20: mol_type = other DNA
tgcagtgagctgagatcgca

SEQ ID NO: 155702 - DNA, 20 bp, synthetic construct
  source 1..20: mol_type = other DNA
ttgcagtgagctgagatcgc

SEQ ID NO: 155703 - DNA, 20 bp, synthetic construct
  source 1..20: mol_type = other DNA
gttgcagtgagctgagatcg

SEQ ID NO: 155704 - DNA, 20 bp, synthetic construct
  source 1..20: mol_type = other DNA
ggttgcagtgagctgagatc

SEQ ID NO: 155705 - DNA, 20 bp, synthetic construct
  source 1..20: mol_type = other DNA
aggttgcagtgagctgagat

SEQ ID NO: 155706 - DNA, 20 bp, synthetic construct
  source 1..20: mol_type = other DNA
gaggttgcagtgagctgaga

SEQ ID NO: 155707 - DNA, 20 bp, synthetic construct
  source 1..20: mol_type = other DNA
agaggttgcagtgagctgag

SEQ ID NO: 155708 - DNA, 20 bp, synthetic construct
  source 1..20: mol_type = other DNA
cagaggttgcagtgagctga

SEQ ID NO: 155709 - DNA, 20 bp, synthetic construct
  source 1..20: mol_type = other DNA
gcagaggttgcagtgagctg

SEQ ID NO: 155710 - DNA, 20 bp, synthetic construct
  source 1..20: mol_type = other DNA
ggcagaggttgcagtgagct

SEQ ID NO: 155711 - DNA, 20 bp, synthetic construct
  source 1..20: mol_type = other DNA
aggcagaggttgcagtgagc

SEQ ID NO: 155712 - DNA, 20 bp, synthetic construct
  source 1..20: mol_type = other DNA
gaggcagaggttgcagtgag

SEQ ID NO: 155713 - DNA, 20 bp, synthetic construct
  source 1..20: mol_type = other DNA
ggaggcagaggttgcagtga

SEQ ID NO: 155714 - DNA, 20 bp, synthetic construct
  source 1..20: mol_type = other DNA
gggaggcagaggttgcagtg

SEQ ID NO: 155715 - DNA, 20 bp, synthetic construct
  source 1..20: mol_type = other DNA
tgggaggcagaggttgcagt

SEQ ID NO: 155716 - DNA, 20 bp, synthetic construct
  source 1..20: mol_type = other DNA
ctgggaggcagaggttgcag

SEQ ID NO: 155717 - DNA, 20 bp, synthetic construct
  source 1..20: mol_type = other DNA
cctgggaggcagaggttgca

SEQ ID NO: 155718 - DNA, 20 bp, synthetic construct
  source 1..20: mol_type = other DNA
acctgggaggcagaggttgc

SEQ ID NO: 155719 - DNA, 20 bp, synthetic construct
  source 1..20: mol_type = other DNA
aacctgggaggcagaggttg

SEQ ID NO: 155720 - DNA, 20 bp, synthetic construct
  source 1..20: mol_type = other DNA
gaacctgggaggcagaggtt

SEQ ID NO: 155721 - DNA, 20 bp, synthetic construct
  source 1..20: mol_type = other DNA
tgaacctgggaggcagaggt

SEQ ID NO: 155722 - DNA, 20 bp, synthetic construct
  source 1..20: mol_type = other DNA
ttgaacctgggaggcagagg

SEQ ID NO: 155723 - DNA, 20 bp, synthetic construct
  source 1..20: mol_type = other DNA
cttgaacctgggaggcagag

SEQ ID NO: 155724 - DNA, 20 bp, synthetic construct
  source 1..20: mol_type = other DNA
gcttgaacctgggaggcaga

SEQ ID NO: 155725 - DNA, 20 bp, synthetic construct
  source 1..20: mol_type = other DNA
cgcttgaacctgggaggcag

SEQ ID NO: 155726 - DNA, 20 bp, synthetic construct
  source 1..20: mol_type = other DNA
tcgcttgaacctgggaggca

SEQ ID NO: 155727 - DNA, 20 bp, synthetic construct
  source 1..20: mol_type = other DNA
atcgcttgaacctgggaggc

SEQ ID NO: 155728 - DNA, 20 bp, synthetic construct
  source 1..20: mol_type = other DNA
aatcgcttgaacctgggagg

SEQ ID NO: 155729 - DNA, 20 bp, synthetic construct
  source 1..20: mol_type = other DNA
gaatcgcttgaacctgggag

SEQ ID NO: 155730 - DNA, 20 bp, synthetic construct
  source 1..20: mol_type = other DNA
agaatcgcttgaacctggga

SEQ ID NO: 155731 - DNA, 20 bp, synthetic construct
  source 1..20: mol_type = other DNA
gagaatcgcttgaacctggg

SEQ ID NO: 155732 - DNA, 20 bp, synthetic construct
  source 1..20: mol_type = other DNA
ggagaatcgcttgaacctgg

SEQ ID NO: 155733 - DNA, 20 bp, synthetic construct
  source 1..20: mol_type = other DNA
aggagaatcgcttgaacctg

SEQ ID NO: 155734 - DNA, 20 bp, synthetic construct
  source 1..20: mol_type = other DNA
caggagaatcgcttgaacct

SEQ ID NO: 155735 - DNA, 20 bp, synthetic construct
  source 1..20: mol_type = other DNA
gcaggagaatcgcttgaacc

SEQ ID NO: 155736 - DNA, 20 bp, synthetic construct
  source 1..20: mol_type = other DNA
ggcaggagaatcgcttgaac

SEQ ID NO: 155737 - DNA, 20 bp, synthetic construct
  source 1..20: mol_type = other DNA
aggcaggagaatcgcttgaa

SEQ ID NO: 155738 - DNA, 20 bp, synthetic construct
  source 1..20: mol_type = other DNA
gaggcaggagaatcgcttga

SEQ ID NO: 155739 - DNA, 20 bp, synthetic construct
  source 1..20: mol_type = other DNA
tgaggcaggagaatcgcttg

SEQ ID NO: 155740 - DNA, 20 bp, synthetic construct
  source 1..20: mol_type = other DNA
ctgaggcaggagaatcgctt

SEQ ID NO: 155741 - DNA, 20 bp, synthetic construct
  source 1..20: mol_type = other DNA
gctgaggcaggagaatcgct

SEQ ID NO: 155742 - DNA, 20 bp, synthetic construct
  source 1..20: mol_type = other DNA
ggctgaggcaggagaatcgc

SEQ ID NO: 155743 - DNA, 20 bp, synthetic construct
  source 1..20: mol_type = other DNA
aggctgaggcaggagaatcg

SEQ ID NO: 155744 - DNA, 20 bp, synthetic construct
  source 1..20: mol_type = other DNA
taggctgaggcaggagaatc

SEQ ID NO: 155745 - DNA, 20 bp, synthetic construct
  source 1..20: mol_type = other DNA
gtaggctgaggcaggagaat

SEQ ID NO: 155746 - DNA, 20 bp, synthetic construct
  source 1..20: mol_type = other DNA
agtaggctgaggcaggagaa

SEQ ID NO: 155747 - DNA, 20 bp, synthetic construct
  source 1..20: mol_type = other DNA
tagtaggctgaggcaggaga

SEQ ID NO: 155748 - DNA, 20 bp, synthetic construct
  source 1..20: mol_type = other DNA
ttagtaggctgaggcaggag

SEQ ID NO: 155749 - DNA, 20 bp, synthetic construct
  source 1..20: mol_type = other DNA
cttagtaggctgaggcagga

SEQ ID NO: 155750 - DNA, 20 bp, synthetic construct
  source 1..20: mol_type = other DNA
acttagtaggctgaggcagg

SEQ ID NO: 155751 - DNA, 20 bp, synthetic construct
  source 1..20: mol_type = other DNA
tacttagtaggctgaggcag

SEQ ID NO: 155752 - DNA, 20 bp, synthetic construct
  source 1..20: mol_type = other DNA
ctacttagtaggctgaggca

SEQ ID NO: 155753 - DNA, 20 bp, synthetic construct
  source 1..20: mol_type = other DNA
gctacttagtaggctgaggc

SEQ ID NO: 155754 - DNA, 20 bp, synthetic construct
  source 1..20: mol_type = other DNA
agctacttagtaggctgagg

SEQ ID NO: 155755 - DNA, 20 bp, synthetic construct
  source 1..20: mol_type = other DNA
cagctacttagtaggctgag

SEQ ID NO: 155756 - DNA, 20 bp, synthetic construct
  source 1..20: mol_type = other DNA
ccagctacttagtaggctga

SEQ ID NO: 155757 - DNA, 20 bp, synthetic construct
  source 1..20: mol_type = other DNA
cccagctacttagtaggctg

SEQ ID NO: 155758 - DNA, 20 bp, synthetic construct
  source 1..20: mol_type = other DNA
tcccagctacttagtaggct

SEQ ID NO: 155759 - DNA, 20 bp, synthetic construct
  source 1..20: mol_type = other DNA
gtcccagctacttagtaggc

SEQ ID NO: 155760 - DNA, 20 bp, synthetic construct
  source 1..20: mol_type = other DNA
agtcccagctacttagtagg

SEQ ID NO: 155761 - DNA, 20 bp, synthetic construct
  source 1..20: mol_type = other DNA
tagtcccagctacttagtag

SEQ ID NO: 155762 - DNA, 20 bp, synthetic construct
  source 1..20: mol_type = other DNA
atagtcccagctacttagta

SEQ ID NO: 155763 - DNA, 20 bp, synthetic construct
  source 1..20: mol_type = other DNA
tatagtcccagctacttagt

SEQ ID NO: 155764 - DNA, 20 bp, synthetic construct
  source 1..20: mol_type = other DNA
ctatagtcccagctacttag

SEQ ID NO: 155765 - DNA, 20 bp, synthetic construct
  source 1..20: mol_type = other DNA
cctatagtcccagctactta

SEQ ID NO: 155766 - DNA, 20 bp, synthetic construct
  source 1..20: mol_type = other DNA
acctatagtcccagctactt

SEQ ID NO: 155767 - DNA, 20 bp, synthetic construct
  source 1..20: mol_type = other DNA
cacctatagtcccagctact

SEQ ID NO: 155768 - DNA, 20 bp, synthetic construct
  source 1..20: mol_type = other DNA
gcacctatagtcccagctac

SEQ ID NO: 155769 - DNA, 20 bp, synthetic construct
  source 1..20: mol_type = other DNA
cgcacctatagtcccagcta

SEQ ID NO: 155770 - DNA, 20 bp, synthetic construct
  source 1..20: mol_type = other DNA
gcgcacctatagtcccagct

SEQ ID NO: 155771 - DNA, 20 bp, synthetic construct
  source 1..20: mol_type = other DNA
tgcgcacctatagtcccagc

SEQ ID NO: 155772 - DNA, 20 bp, synthetic construct
  source 1..20: mol_type = other DNA
gtgcgcacctatagtcccag

SEQ ID NO: 155773 - DNA, 20 bp, synthetic construct
  source 1..20: mol_type = other DNA
ggtgcgcacctatagtccca

SEQ ID NO: 155774 - DNA, 20 bp, synthetic construct
  source 1..20: mol_type = other DNA
tggtgcgcacctatagtccc

SEQ ID NO: 155775 - DNA, 20 bp, synthetic construct
  source 1..20: mol_type = other DNA
gtggtgcgcacctatagtcc

SEQ ID NO: 155776 - DNA, 20 bp, synthetic construct
  source 1..20: mol_type = other DNA
ggtggtgcgcacctatagtc

SEQ ID NO: 155777 - DNA, 20 bp, synthetic construct
  source 1..20: mol_type = other DNA
tggtggtgcgcacctatagt

SEQ ID NO: 155778 - DNA, 20 bp, synthetic construct
  source 1..20: mol_type = other DNA
gtggtggtgcgcacctatag

SEQ ID NO: 155779 - DNA, 20 bp, synthetic construct
  source 1..20: mol_type = other DNA
cgtggtggtgcgcacctata

SEQ ID NO: 155780 - DNA, 20 bp, synthetic construct
  source 1..20: mol_type = other DNA
gcgtggtggtgcgcacctat

SEQ ID NO: 155781 - DNA, 20 bp, synthetic construct
  source 1..20: mol_type = other DNA
ggcgtggtggtgcgcaccta

SEQ ID NO: 155782 - DNA, 20 bp, synthetic construct
  source 1..20: mol_type = other DNA
aggcgtggtggtgcgcacct

SEQ ID NO: 155783 - DNA, 20 bp, synthetic construct
  source 1..20: mol_type = other DNA
taggcgtggtggtgcgcacc

SEQ ID NO: 155784 - DNA, 20 bp, synthetic construct
  source 1..20: mol_type = other DNA
ctaggcgtggtggtgcgcac

SEQ ID NO: 155785 - DNA, 20 bp, synthetic construct
  source 1..20: mol_type = other DNA
gctaggcgtggtggtgcgca

SEQ ID NO: 155786 - DNA, 20 bp, synthetic construct
  source 1..20: mol_type = other DNA
agctaggcgtggtggtgcgc

SEQ ID NO: 155787 - DNA, 20 bp, synthetic construct
  source 1..20: mol_type = other DNA
tagctaggcgtggtggtgcg

SEQ ID NO: 155788 - DNA, 20 bp, synthetic construct
  source 1..20: mol_type = other DNA
ttagctaggcgtggtggtgc

SEQ ID NO: 155789 - DNA, 20 bp, synthetic construct
  source 1..20: mol_type = other DNA
attagctaggcgtggtggtg

SEQ ID NO: 155790 - DNA, 20 bp, synthetic construct
  source 1..20: mol_type = other DNA
aattagctaggcgtggtggt

SEQ ID NO: 155791 - DNA, 20 bp, synthetic construct
  source 1..20: mol_type = other DNA
aaattagctaggcgtggtgg

SEQ ID NO: 155792 - DNA, 20 bp, synthetic construct
  source 1..20: mol_type = other DNA
aaaattagctaggcgtggtg

SEQ ID NO: 155793 - DNA, 20 bp, synthetic construct
  source 1..20: mol_type = other DNA
aaaaattagctaggcgtggt

SEQ ID NO: 155794 - DNA, 20 bp, synthetic construct
  source 1..20: mol_type = other DNA
caaaaattagctaggcgtgg

SEQ ID NO: 155795 - DNA, 20 bp, synthetic construct
  source 1..20: mol_type = other DNA
acaaaaattagctaggcgtg

SEQ ID NO: 155796 - DNA, 20 bp, synthetic construct
  source 1..20: mol_type = other DNA
tacaaaaattagctaggcgt

SEQ ID NO: 155797 - DNA, 20 bp, synthetic construct
  source 1..20: mol_type = other DNA
atacaaaaattagctaggcg

SEQ ID NO: 155798 - DNA, 20 bp, synthetic construct
  source 1..20: mol_type = other DNA
aatacaaaaattagctaggc

SEQ ID NO: 155799 - DNA, 20 bp, synthetic construct
  source 1..20: mol_type = other DNA
aaatacaaaaattagctagg

SEQ ID NO: 155800 - DNA, 20 bp, synthetic construct
  source 1..20: mol_type = other DNA
aaaatacaaaaattagctag

SEQ ID NO: 155801 - DNA, 20 bp, synthetic construct
  source 1..20: mol_type = other DNA
aaaaatacaaaaattagcta

SEQ ID NO: 155802 - DNA, 20 bp, synthetic construct
  source 1..20: mol_type = other DNA
aaaaaatacaaaaattagct

SEQ ID NO: 155803 - DNA, 20 bp, synthetic construct
  source 1..20: mol_type = other DNA
gaaaaaatacaaaaattagc

SEQ ID NO: 155804 - DNA, 20 bp, synthetic construct
  source 1..20: mol_type = other DNA
tgaaaaaatacaaaaattag

SEQ ID NO: 155805 - DNA, 20 bp, synthetic construct
  source 1..20: mol_type = other DNA
ctgaaaaaatacaaaaatta

SEQ ID NO: 155806 - DNA, 20 bp, synthetic construct
  source 1..20: mol_type = other DNA
actgaaaaaatacaaaaatt

SEQ ID NO: 155807 - DNA, 20 bp, synthetic construct
  source 1..20: mol_type = other DNA
tactgaaaaaatacaaaaat

SEQ ID NO: 155808 - DNA, 20 bp, synthetic construct
  source 1..20: mol_type = other DNA
ctactgaaaaaatacaaaaa

SEQ ID NO: 155809 - DNA, 20 bp, synthetic construct
  source 1..20: mol_type = other DNA
tctactgaaaaaatacaaaa

SEQ ID NO: 155810 - DNA, 20 bp, synthetic construct
  source 1..20: mol_type = other DNA
ctctactgaaaaaatacaaa

SEQ ID NO: 155811 - DNA, 20 bp, synthetic construct
  source 1..20: mol_type = other DNA
tctctactgaaaaaatacaa

SEQ ID NO: 155812 - DNA, 20 bp, synthetic construct
  source 1..20: mol_type = other DNA
gtctctactgaaaaaataca

SEQ ID NO: 155813 - DNA, 20 bp, synthetic construct
  source 1..20: mol_type = other DNA
tgtctctactgaaaaaatac

SEQ ID NO: 155814 - DNA, 20 bp, synthetic construct
  source 1..20: mol_type = other DNA
ctgtctctactgaaaaaata

SEQ ID NO: 155815 - DNA, 20 bp, synthetic construct
  source 1..20: mol_type = other DNA
cctgtctctactgaaaaaat

SEQ ID NO: 155816 - DNA, 20 bp, synthetic construct
  source 1..20: mol_type = other DNA
ccctgtctctactgaaaaaa

SEQ ID NO: 155817 - DNA, 20 bp, synthetic construct
  source 1..20: mol_type = other DNA
accctgtctctactgaaaaa

SEQ ID NO: 155818 - DNA, 20 bp, synthetic construct
  source 1..20: mol_type = other DNA
aaccctgtctctactgaaaa

SEQ ID NO: 155819 - DNA, 20 bp, synthetic construct
  source 1..20: mol_type = other DNA
aaaccctgtctctactgaaa

SEQ ID NO: 155820 - DNA, 20 bp, synthetic construct
  source 1..20: mol_type = other DNA
aaaaccctgtctctactgaa

SEQ ID NO: 155821 - DNA, 20 bp, synthetic construct
  source 1..20: mol_type = other DNA
caaaaccctgtctctactga

SEQ ID NO: 155822 - DNA, 20 bp, synthetic construct
  source 1..20: mol_type = other DNA
gcaaaaccctgtctctactg

SEQ ID NO: 155823 - DNA, 20 bp, synthetic construct
  source 1..20: mol_type = other DNA
agcaaaaccctgtctctact

SEQ ID NO: 155824 - DNA, 20 bp, synthetic construct
  source 1..20: mol_type = other DNA
tagcaaaaccctgtctctac

SEQ ID NO: 155825 - DNA, 20 bp, synthetic construct
  source 1..20: mol_type = other DNA
atagcaaaaccctgtctcta

SEQ ID NO: 155826 - DNA, 20 bp, synthetic construct
  source 1..20: mol_type = other DNA
catagcaaaaccctgtctct

SEQ ID NO: 155827 - DNA, 20 bp, synthetic construct
  source 1..20: mol_type = other DNA
gcatagcaaaaccctgtctc

SEQ ID NO: 155828 - DNA, 20 bp, synthetic construct
  source 1..20: mol_type = other DNA
agcatagcaaaaccctgtct

SEQ ID NO: 155829 - DNA, 20 bp, synthetic construct
  source 1..20: mol_type = other DNA
cagcatagcaaaaccctgtc

SEQ ID NO: 155830 - DNA, 20 bp, synthetic construct
  source 1..20: mol_type = other DNA
ccagcatagcaaaaccctgt

SEQ ID NO: 155831 - DNA, 20 bp, synthetic construct
  source 1..20: mol_type = other DNA
gccagcatagcaaaaccctg

SEQ ID NO: 155832 - DNA, 20 bp, synthetic construct
  source 1..20: mol_type = other DNA
ggccagcatagcaaaaccct

SEQ ID NO: 155833 - DNA, 20 bp, synthetic construct
  source 1..20: mol_type = other DNA
tggccagcatagcaaaaccc

SEQ ID NO: 155834 - DNA, 20 bp, synthetic construct
  source 1..20: mol_type = other DNA
ctggccagcatagcaaaacc

SEQ ID NO: 155835 - DNA, 20 bp, synthetic construct
  source 1..20: mol_type = other DNA
cctggccagcatagcaaaac

SEQ ID NO: 155836 - DNA, 20 bp, synthetic construct
  source 1..20: mol_type = other DNA
gcctggccagcatagcaaaa

SEQ ID NO: 155837 - DNA, 20 bp, synthetic construct
  source 1..20: mol_type = other DNA
agcctggccagcatagcaaa

SEQ ID NO: 155838 - DNA, 20 bp, synthetic construct
  source 1..20: mol_type = other DNA
cagcctggccagcatagcaa

SEQ ID NO: 155839 - DNA, 20 bp, synthetic construct
  source 1..20: mol_type = other DNA
ccagcctggccagcatagca

SEQ ID NO: 155840 - DNA, 20 bp, synthetic construct
  source 1..20: mol_type = other DNA
accagcctggccagcatagc

SEQ ID NO: 155841 - DNA, 20 bp, synthetic construct
  source 1..20: mol_type = other DNA
gaccagcctggccagcatag

SEQ ID NO: 155842 - DNA, 20 bp, synthetic construct
  source 1..20: mol_type = other DNA
agaccagcctggccagcata

SEQ ID NO: 155843 - DNA, 20 bp, synthetic construct
  source 1..20: mol_type = other DNA
gagaccagcctggccagcat

SEQ ID NO: 155844 - DNA, 20 bp, synthetic construct
  source 1..20: mol_type = other DNA
tgagaccagcctggccagca

SEQ ID NO: 155845 - DNA, 20 bp, synthetic construct
  source 1..20: mol_type = other DNA
ttgagaccagcctggccagc

SEQ ID NO: 155846 - DNA, 20 bp, synthetic construct
  source 1..20: mol_type = other DNA
tttgagaccagcctggccag

SEQ ID NO: 155847 - DNA, 20 bp, synthetic construct
  source 1..20: mol_type = other DNA
gtttgagaccagcctggcca

SEQ ID NO: 155848 - DNA, 20 bp, synthetic construct
  source 1..20: mol_type = other DNA
agtttgagaccagcctggcc

SEQ ID NO: 155849 - DNA, 20 bp, synthetic construct
  source 1..20: mol_type = other DNA
gagtttgagaccagcctggc

SEQ ID NO: 155850 - DNA, 20 bp, synthetic construct
  source 1..20: mol_type = other DNA
ggagtttgagaccagcctgg

SEQ ID NO: 155851 - DNA, 20 bp, synthetic construct
  source 1..20: mol_type = other DNA
aggagtttgagaccagcctg

SEQ ID NO: 155852 - DNA, 20 bp, synthetic construct
  source 1..20: mol_type = other DNA
caggagtttgagaccagcct

SEQ ID NO: 155853 - DNA, 20 bp, synthetic construct
  source 1..20: mol_type = other DNA
tcaggagtttgagaccagcc

SEQ ID NO: 155854 - DNA, 20 bp, synthetic construct
  source 1..20: mol_type = other DNA
gtcaggagtttgagaccagc

SEQ ID NO: 155855 - DNA, 20 bp, synthetic construct
  source 1..20: mol_type = other DNA
ggtcaggagtttgagaccag

SEQ ID NO: 155856 - DNA, 20 bp, synthetic construct
  source 1..20: mol_type = other DNA
aggtcaggagtttgagacca

SEQ ID NO: 155857 - DNA, 20 bp, synthetic construct
  source 1..20: mol_type = other DNA
gaggtcaggagtttgagacc

SEQ ID NO: 155858 - DNA, 20 bp, synthetic construct
  source 1..20: mol_type = other DNA
tgaggtcaggagtttgagac

SEQ ID NO: 155859 - DNA, 20 bp, synthetic construct
  source 1..20: mol_type = other DNA
ctgaggtcaggagtttgaga

SEQ ID NO: 155860 - DNA, 20 bp, synthetic construct
  source 1..20: mol_type = other DNA
tctgaggtcaggagtttgag

SEQ ID NO: 155861 - DNA, 20 bp, synthetic construct
  source 1..20: mol_type = other DNA
atctgaggtcaggagtttga

SEQ ID NO: 155862 - DNA, 20 bp, synthetic construct
  source 1..20: mol_type = other DNA
catctgaggtcaggagtttg

SEQ ID NO: 155863 - DNA, 20 bp, synthetic construct
  source 1..20: mol_type = other DNA
tcatctgaggtcaggagttt

SEQ ID NO: 155864 - DNA, 20 bp, synthetic construct
  source 1..20: mol_type = other DNA
atcatctgaggtcaggagtt

SEQ ID NO: 155865 - DNA, 20 bp, synthetic construct
  source 1..20: mol_type = other DNA
gatcatctgaggtcaggagt

SEQ ID NO: 155866 - DNA, 20 bp, synthetic construct
  source 1..20: mol_type = other DNA
ggatcatctgaggtcaggag

SEQ ID NO: 155867 - DNA, 20 bp, synthetic construct
  source 1..20: mol_type = other DNA
tggatcatctgaggtcagga

SEQ ID NO: 155868 - DNA, 20 bp, synthetic construct
  source 1..20: mol_type = other DNA
ctggatcatctgaggtcagg

SEQ ID NO: 155869 - DNA, 20 bp, synthetic construct
  source 1..20: mol_type = other DNA
gctggatcatctgaggtcag

SEQ ID NO: 155870 - DNA, 20 bp, synthetic construct
  source 1..20: mol_type = other DNA
ggctggatcatctgaggtca

SEQ ID NO: 155871 - DNA, 20 bp, synthetic construct
  source 1..20: mol_type = other DNA
tggctggatcatctgaggtc

SEQ ID NO: 155872 - DNA, 20 bp, synthetic construct
  source 1..20: mol_type = other DNA
gtggctggatcatctgaggt

SEQ ID NO: 155873 - DNA, 20 bp, synthetic construct
  source 1..20: mol_type = other DNA
ggtggctggatcatctgagg

SEQ ID NO: 155874 - DNA, 20 bp, synthetic construct
  source 1..20: mol_type = other DNA
aggtggctggatcatctgag

SEQ ID NO: 155875 - DNA, 20 bp, synthetic construct
  source 1..20: mol_type = other DNA
gaggtggctggatcatctga

SEQ ID NO: 155876 - DNA, 20 bp, synthetic construct
  source 1..20: mol_type = other DNA
tgaggtggctggatcatctg

SEQ ID NO: 155877 - DNA, 20 bp, synthetic construct
  source 1..20: mol_type = other DNA
ctgaggtggctggatcatct

SEQ ID NO: 155878 - DNA, 20 bp, synthetic construct
  source 1..20: mol_type = other DNA
gctgaggtggctggatcatc

SEQ ID NO: 155879 - DNA, 20 bp, synthetic construct
  source 1..20: mol_type = other DNA
agctgaggtggctggatcat

SEQ ID NO: 155880 - DNA, 20 bp, synthetic construct
  source 1..20: mol_type = other DNA
aagctgaggtggctggatca

SEQ ID NO: 155881 - DNA, 20 bp, synthetic construct
  source 1..20: mol_type = other DNA
gaagctgaggtggctggatc

SEQ ID NO: 155882 - DNA, 20 bp, synthetic construct
  source 1..20: mol_type = other DNA
ggaagctgaggtggctggat

SEQ ID NO: 155883 - DNA, 20 bp, synthetic construct
  source 1..20: mol_type = other DNA
gggaagctgaggtggctgga

SEQ ID NO: 155884 - DNA, 20 bp, synthetic construct
  source 1..20: mol_type = other DNA
tgggaagctgaggtggctgg

SEQ ID NO: 155885 - DNA, 20 bp, synthetic construct
  source 1..20: mol_type = other DNA
ttgggaagctgaggtggctg

SEQ ID NO: 155886 - DNA, 20 bp, synthetic construct
  source 1..20: mol_type = other DNA
tttgggaagctgaggtggct

SEQ ID NO: 155887 - DNA, 20 bp, synthetic construct
  source 1..20: mol_type = other DNA
ctttgggaagctgaggtggc

SEQ ID NO: 155888 - DNA, 20 bp, synthetic construct
  source 1..20: mol_type = other DNA
actttgggaagctgaggtgg

SEQ ID NO: 155889 - DNA, 20 bp, synthetic construct
  source 1..20: mol_type = other DNA
cactttgggaagctgaggtg

SEQ ID NO: 155890 - DNA, 20 bp, synthetic construct
  source 1..20: mol_type = other DNA
gcactttgggaagctgaggt

SEQ ID NO: 155891 - DNA, 20 bp, synthetic construct
  source 1..20: mol_type = other DNA
agcactttgggaagctgagg

SEQ ID NO: 155892 - DNA, 20 bp, synthetic construct
  source 1..20: mol_type = other DNA
cagcactttgggaagctgag

SEQ ID NO: 155893 - DNA, 20 bp, synthetic construct
  source 1..20: mol_type = other DNA
ccagcactttgggaagctga

SEQ ID NO: 155894 - DNA, 20 bp, synthetic construct
  source 1..20: mol_type = other DNA
cccagcactttgggaagctg

SEQ ID NO: 155895 - DNA, 20 bp, synthetic construct
  source 1..20: mol_type = other DNA
ccccagcactttgggaagct

SEQ ID NO: 155896 - DNA, 20 bp, synthetic construct
  source 1..20: mol_type = other DNA
accccagcactttgggaagc

SEQ ID NO: 155897 - DNA, 20 bp, synthetic construct
  source 1..20: mol_type = other DNA
aaccccagcactttgggaag

SEQ ID NO: 155898 - DNA, 20 bp, synthetic construct
  source 1..20: mol_type = other DNA
gaaccccagcactttgggaa

SEQ ID NO: 155899 - DNA, 20 bp, synthetic construct
  source 1..20: mol_type = other DNA
ggaaccccagcactttggga

SEQ ID NO: 155900 - DNA, 20 bp, synthetic construct
  source 1..20: mol_type = other DNA
tggaaccccagcactttggg

SEQ ID NO: 155901 - DNA, 20 bp, synthetic construct
  source 1..20: mol_type = other DNA
ctggaaccccagcactttgg

SEQ ID NO: 155902 - DNA, 20 bp, synthetic construct
  source 1..20: mol_type = other DNA
cctggaaccccagcactttg

SEQ ID NO: 155903 - DNA, 20 bp, synthetic construct
  source 1..20: mol_type = other DNA
acctggaaccccagcacttt

SEQ ID NO: 155904 - DNA, 20 bp, synthetic construct
  source 1..20: mol_type = other DNA
cacctggaaccccagcactt

SEQ ID NO: 155905 - DNA, 20 bp, synthetic construct
  source 1..20: mol_type = other DNA
acacctggaaccccagcact

SEQ ID NO: 155906 - DNA, 20 bp, synthetic construct
  source 1..20: mol_type = other DNA
aacacctggaaccccagcac

SEQ ID NO: 155907 - DNA, 20 bp, synthetic construct
  source 1..20: mol_type = other DNA
taacacctggaaccccagca

SEQ ID NO: 155908 - DNA, 20 bp, synthetic construct
  source 1..20: mol_type = other DNA
ctaacacctggaaccccagc

SEQ ID NO: 155909 - DNA, 20 bp, synthetic construct
  source 1..20: mol_type = other DNA
gctaacacctggaaccccag

SEQ ID NO: 155910 - DNA, 20 bp, synthetic construct
  source 1..20: mol_type = other DNA
ggctaacacctggaacccca

SEQ ID NO: 155911 - DNA, 20 bp, synthetic construct
  source 1..20: mol_type = other DNA
tggctaacacctggaacccc

SEQ ID NO: 155912 - DNA, 20 bp, synthetic construct
  source 1..20: mol_type = other DNA
gtggctaacacctggaaccc

SEQ ID NO: 155913 - DNA, 20 bp, synthetic construct
  source 1..20: mol_type = other DNA
ggtggctaacacctggaacc

SEQ ID NO: 155914 - DNA, 20 bp, synthetic construct
  source 1..20: mol_type = other DNA
tggtggctaacacctggaac

SEQ ID NO: 155915 - DNA, 20 bp, synthetic construct
  source 1..20: mol_type = other DNA
atggtggctaacacctggaa

SEQ ID NO: 155916 - DNA, 20 bp, synthetic construct
  source 1..20: mol_type = other DNA
catggtggctaacacctgga

SEQ ID NO: 155917 - DNA, 20 bp, synthetic construct
  source 1..20: mol_type = other DNA
gcatggtggctaacacctgg

SEQ ID NO: 155918 - DNA, 20 bp, synthetic construct
  source 1..20: mol_type = other DNA
ggcatggtggctaacacctg

SEQ ID NO: 155919 - DNA, 20 bp, synthetic construct
  source 1..20: mol_type = other DNA
aggcatggtggctaacacct

SEQ ID NO: 155920 - DNA, 20 bp, synthetic construct
  source 1..20: mol_type = other DNA
caggcatggtggctaacacc

SEQ ID NO: 155921 - DNA, 20 bp, synthetic construct
  source 1..20: mol_type = other DNA
ccaggcatggtggctaacac

SEQ ID NO: 155922 - DNA, 20 bp, synthetic construct
  source 1..20: mol_type = other DNA
gccaggcatggtggctaaca

SEQ ID NO: 155923 - DNA, 20 bp, synthetic construct
  source 1..20: mol_type = other DNA
ggccaggcatggtggctaac

SEQ ID NO: 155924 - DNA, 20 bp, synthetic construct
  source 1..20: mol_type = other DNA
tggccaggcatggtggctaa

SEQ ID NO: 155925 - DNA, 20 bp, synthetic construct
  source 1..20: mol_type = other DNA
atggccaggcatggtggcta

SEQ ID NO: 155926 - DNA, 20 bp, synthetic construct
  source 1..20: mol_type = other DNA
tatggccaggcatggtggct

SEQ ID NO: 155927 - DNA, 20 bp, synthetic construct
  source 1..20: mol_type = other DNA
ctatggccaggcatggtggc

SEQ ID NO: 155928 - DNA, 20 bp, synthetic construct
  source 1..20: mol_type = other DNA
tctatggccaggcatggtgg

SEQ ID NO: 155929 - DNA, 20 bp, synthetic construct
  source 1..20: mol_type = other DNA
gtctatggccaggcatggtg

SEQ ID NO: 155930 - DNA, 20 bp, synthetic construct
  source 1..20: mol_type = other DNA
agtctatggccaggcatggt

SEQ ID NO: 155931 - DNA, 20 bp, synthetic construct
  source 1..20: mol_type = other DNA
aagtctatggccaggcatgg

SEQ ID NO: 155932 - DNA, 20 bp, synthetic construct
  source 1..20: mol_type = other DNA
caagtctatggccaggcatg

SEQ ID NO: 155933 - DNA, 20 bp, synthetic construct
  source 1..20: mol_type = other DNA
acaagtctatggccaggcat

SEQ ID NO: 155934 - DNA, 20 bp, synthetic construct
  source 1..20: mol_type = other DNA
aacaagtctatggccaggca

SEQ ID NO: 155935 - DNA, 20 bp, synthetic construct
  source 1..20: mol_type = other DNA
aaacaagtctatggccaggc

SEQ ID NO: 155936 - DNA, 20 bp, synthetic construct
  source 1..20: mol_type = other DNA
gaaacaagtctatggccagg

SEQ ID NO: 155937 - DNA, 20 bp, synthetic construct
  source 1..20: mol_type = other DNA
agaaacaagtctatggccag

SEQ ID NO: 155938 - DNA, 20 bp, synthetic construct
  source 1..20: mol_type = other DNA
cagaaacaagtctatggcca

SEQ ID NO: 155939 - DNA, 20 bp, synthetic construct
  source 1..20: mol_type = other DNA
acagaaacaagtctatggcc

SEQ ID NO: 155940 - DNA, 20 bp, synthetic construct
  source 1..20: mol_type = other DNA
aacagaaacaagtctatggc

SEQ ID NO: 155941 - DNA, 20 bp, synthetic construct
  source 1..20: mol_type = other DNA
gaacagaaacaagtctatgg

SEQ ID NO: 155942 - DNA, 20 bp, synthetic construct
  source 1..20: mol_type = other DNA
ggaacagaaacaagtctatg

SEQ ID NO: 155943 - DNA, 20 bp, synthetic construct
  source 1..20: mol_type = other DNA
gggaacagaaacaagtctat

SEQ ID NO: 155944 - DNA, 20 bp, synthetic construct
  source 1..20: mol_type = other DNA
agggaacagaaacaagtcta

SEQ ID NO: 155945 - DNA, 20 bp, synthetic construct
  source 1..20: mol_type = other DNA
aagggaacagaaacaagtct

SEQ ID NO: 155946 - DNA, 20 bp, synthetic construct
  source 1..20: mol_type = other DNA
gaagggaacagaaacaagtc

SEQ ID NO: 155947 - DNA, 20 bp, synthetic construct
  source 1..20: mol_type = other DNA
agaagggaacagaaacaagt

SEQ ID NO: 155948 - DNA, 20 bp, synthetic construct
  source 1..20: mol_type = other DNA
gagaagggaacagaaacaag

SEQ ID NO: 155949 - DNA, 20 bp, synthetic construct
  source 1..20: mol_type = other DNA
tgagaagggaacagaaacaa

SEQ ID NO: 155950 - DNA, 20 bp, synthetic construct
  source 1..20: mol_type = other DNA
gtgagaagggaacagaaaca

SEQ ID NO: 155951 - DNA, 20 bp, synthetic construct
  source 1..20: mol_type = other DNA
agtgagaagggaacagaaac

SEQ ID NO: 155952 - DNA, 20 bp, synthetic construct
  source 1..20: mol_type = other DNA
cagtgagaagggaacagaaa

SEQ ID NO: 155953 - DNA, 20 bp, synthetic construct
  source 1..20: mol_type = other DNA
acagtgagaagggaacagaa

SEQ ID NO: 155954 - DNA, 20 bp, synthetic construct
  source 1..20: mol_type = other DNA
cacagtgagaagggaacaga

SEQ ID NO: 155955 - DNA, 20 bp, synthetic construct
  source 1..20: mol_type = other DNA
ccacagtgagaagggaacag

SEQ ID NO: 155956 - DNA, 20 bp, synthetic construct
  source 1..20: mol_type = other DNA
gccacagtgagaagggaaca

SEQ ID NO: 155957 - DNA, 20 bp, synthetic construct
  source 1..20: mol_type = other DNA
agccacagtgagaagggaac

SEQ ID NO: 155958 - DNA, 20 bp, synthetic construct
  source 1..20: mol_type = other DNA
cagccacagtgagaagggaa

SEQ ID NO: 155959 - DNA, 20 bp, synthetic construct
  source 1..20: mol_type = other DNA
acagccacagtgagaaggga

SEQ ID NO: 155960 - DNA, 20 bp, synthetic construct
  source 1..20: mol_type = other DNA
tacagccacagtgagaaggg

SEQ ID NO: 155961 - DNA, 20 bp, synthetic construct
  source 1..20: mol_type = other DNA
gtacagccacagtgagaagg

SEQ ID NO: 155962 - DNA, 20 bp, synthetic construct
  source 1..20: mol_type = other DNA
ggtacagccacagtgagaag

SEQ ID NO: 155963 - DNA, 20 bp, synthetic construct
  source 1..20: mol_type = other DNA
tggtacagccacagtgagaa

SEQ ID NO: 155964 - DNA, 20 bp, synthetic construct
  source 1..20: mol_type = other DNA
ttggtacagccacagtgaga

SEQ ID NO: 155965 - DNA, 20 bp, synthetic construct
  source 1..20: mol_type = other DNA
cttggtacagccacagtgag

SEQ ID NO: 155966 - DNA, 20 bp, synthetic construct
  source 1..20: mol_type = other DNA
ccttggtacagccacagtga

SEQ ID NO: 155967 - DNA, 20 bp, synthetic construct
  source 1..20: mol_type = other DNA
accttggtacagccacagtg

SEQ ID NO: 155968 - DNA, 20 bp, synthetic construct
  source 1..20: mol_type = other DNA
caccttggtacagccacagt

SEQ ID NO: 155969 - DNA, 20 bp, synthetic construct
  source 1..20: mol_type = other DNA
acaccttggtacagccacag

SEQ ID NO: 155970 - DNA, 20 bp, synthetic construct
  source 1..20: mol_type = other DNA
aacaccttggtacagccaca

SEQ ID NO: 155971 - DNA, 20 bp, synthetic construct
  source 1..20: mol_type = other DNA
caacaccttggtacagccac

SEQ ID NO: 155972 - DNA, 20 bp, synthetic construct
  source 1..20: mol_type = other DNA
gcaacaccttggtacagcca

SEQ ID NO: 155973 - DNA, 20 bp, synthetic construct
  source 1..20: mol_type = other DNA
agcaacaccttggtacagcc

SEQ ID NO: 155974 - DNA, 20 bp, synthetic construct
  source 1..20: mol_type = other DNA
aagcaacaccttggtacagc

SEQ ID NO: 155975 - DNA, 20 bp, synthetic construct
  source 1..20: mol_type = other DNA
taagcaacaccttggtacag

SEQ ID NO: 155976 - DNA, 20 bp, synthetic construct
  source 1..20: mol_type = other DNA
ataagcaacaccttggtaca

SEQ ID NO: 155977 - DNA, 20 bp, synthetic construct
  source 1..20: mol_type = other DNA
gataagcaacaccttggtac

SEQ ID NO: 155978 - DNA, 20 bp, synthetic construct
  source 1..20: mol_type = other DNA
ggataagcaacaccttggta

SEQ ID NO: 155979 - DNA, 20 bp, synthetic construct
  source 1..20: mol_type = other DNA
gggataagcaacaccttggt

SEQ ID NO: 155980 - DNA, 20 bp, synthetic construct
  source 1..20: mol_type = other DNA
tgggataagcaacaccttgg

SEQ ID NO: 155981 - DNA, 20 bp, synthetic construct
  source 1..20: mol_type = other DNA
ctgggataagcaacaccttg

SEQ ID NO: 155982 - DNA, 20 bp, synthetic construct
  source 1..20: mol_type = other DNA
tctgggataagcaacacctt

SEQ ID NO: 155983 - DNA, 20 bp, synthetic construct
  source 1..20: mol_type = other DNA
ttctgggataagcaacacct

SEQ ID NO: 155984 - DNA, 20 bp, synthetic construct
  source 1..20: mol_type = other DNA
cttctgggataagcaacacc

SEQ ID NO: 155985 - DNA, 20 bp, synthetic construct
  source 1..20: mol_type = other DNA
acttctgggataagcaacac

SEQ ID NO: 155986 - DNA, 20 bp, synthetic construct
  source 1..20: mol_type = other DNA
gacttctgggataagcaaca

SEQ ID NO: 155987 - DNA, 20 bp, synthetic construct
  source 1..20: mol_type = other DNA
cgacttctgggataagcaac

SEQ ID NO: 155988 - DNA, 20 bp, synthetic construct
  source 1..20: mol_type = other DNA
acgacttctgggataagcaa

SEQ ID NO: 155989 - DNA, 20 bp, synthetic construct
  source 1..20: mol_type = other DNA
cacgacttctgggataagca

SEQ ID NO: 155990 - DNA, 20 bp, synthetic construct
  source 1..20: mol_type = other DNA
tcacgacttctgggataagc

SEQ ID NO: 155991 - DNA, 20 bp, synthetic construct
  source 1..20: mol_type = other DNA
atcacgacttctgggataag

SEQ ID NO: 155992 - DNA, 20 bp, synthetic construct
  source 1..20: mol_type = other DNA
catcacgacttctgggataa

SEQ ID NO: 155993 - DNA, 20 bp, synthetic construct
  source 1..20: mol_type = other DNA
gcatcacgacttctgggata

SEQ ID NO: 155994 - DNA, 20 bp, synthetic construct
  source 1..20: mol_type = other DNA
tgcatcacgacttctgggat

SEQ ID NO: 155995 - DNA, 20 bp, synthetic construct
  source 1..20: mol_type = other DNA
ctgcatcacgacttctggga

SEQ ID NO: 155996 - DNA, 20 bp, synthetic construct
  source 1..20: mol_type = other DNA
cctgcatcacgacttctggg

SEQ ID NO: 155997 - DNA, 20 bp, synthetic construct
  source 1..20: mol_type = other DNA
acctgcatcacgacttctgg

SEQ ID NO: 155998 - DNA, 20 bp, synthetic construct
  source 1..20: mol_type = other DNA
gacctgcatcacgacttctg

SEQ ID NO: 155999 - DNA, 20 bp, synthetic construct
  source 1..20: mol_type = other DNA
tgacctgcatcacgacttct

SEQ ID NO: 156000 - DNA, 20 bp, synthetic construct
  source 1..20: mol_type = other DNA
ctgacctgcatcacgacttc

SEQ ID NO: 156001 - DNA, 20 bp, synthetic construct
  source 1..20: mol_type = other DNA
gctgacctgcatcacgactt

SEQ ID NO: 156002 - DNA, 20 bp, synthetic construct
  source 1..20: mol_type = other DNA
tgctgacctgcatcacgact

SEQ ID NO: 156003 - DNA, 20 bp, synthetic construct
  source 1..20: mol_type = other DNA
gtgctgacctgcatcacgac

SEQ ID NO: 156004 - DNA, 20 bp, synthetic construct
  source 1..20: mol_type = other DNA
agtgctgacctgcatcacga

SEQ ID NO: 156005 - DNA, 20 bp, synthetic construct
  source 1..20: mol_type = other DNA
aagtgctgacctgcatcacg

SEQ ID NO: 156006 - DNA, 20 bp, synthetic construct
  source 1..20: mol_type = other DNA
aaagtgctgacctgcatcac

SEQ ID NO: 156007 - DNA, 20 bp, synthetic construct
  source 1..20: mol_type = other DNA
gaaagtgctgacctgcatca

SEQ ID NO: 156008 - DNA, 20 bp, synthetic construct
  source 1..20: mol_type = other DNA
agaaagtgctgacctgcatc

SEQ ID NO: 156009 - DNA, 20 bp, synthetic construct
  source 1..20: mol_type = other DNA
gagaaagtgctgacctgcat

SEQ ID NO: 156010 - DNA, 20 bp, synthetic construct
  source 1..20: mol_type = other DNA
ggagaaagtgctgacctgca

SEQ ID NO: 156011 - DNA, 20 bp, synthetic construct
  source 1..20: mol_type = other DNA
tggagaaagtgctgacctgc

SEQ ID NO: 156012 - DNA, 20 bp, synthetic construct
  source 1..20: mol_type = other DNA
atggagaaagtgctgacctg

SEQ ID NO: 156013 - DNA, 20 bp, synthetic construct
  source 1..20: mol_type = other DNA
catggagaaagtgctgacct

SEQ ID NO: 156014 - DNA, 20 bp, synthetic construct
  source 1..20: mol_type = other DNA
ccatggagaaagtgctgacc

SEQ ID NO: 156015 - DNA, 20 bp, synthetic construct
  source 1..20: mol_type = other DNA
cccatggagaaagtgctgac

SEQ ID NO: 156016 - DNA, 20 bp, synthetic construct
  source 1..20: mol_type = other DNA
tcccatggagaaagtgctga

SEQ ID NO: 156017 - DNA, 20 bp, synthetic construct
  source 1..20: mol_type = other DNA
ttcccatggagaaagtgctg

SEQ ID NO: 156018 - DNA, 20 bp, synthetic construct
  source 1..20: mol_type = other DNA
cttcccatggagaaagtgct

SEQ ID NO: 156019 - DNA, 20 bp, synthetic construct
  source 1..20: mol_type = other DNA
acttcccatggagaaagtgc

SEQ ID NO: 156020 - DNA, 20 bp, synthetic construct
  source 1..20: mol_type = other DNA
aacttcccatggagaaagtg

SEQ ID NO: 156021 - DNA, 20 bp, synthetic construct
  source 1..20: mol_type = other DNA
aaacttcccatggagaaagt

SEQ ID NO: 156022 - DNA, 20 bp, synthetic construct
  source 1..20: mol_type = other DNA
aaaacttcccatggagaaag

SEQ ID NO: 156023 - DNA, 20 bp, synthetic construct
  source 1..20: mol_type = other DNA
taaaacttcccatggagaaa

SEQ ID NO: 156024 - DNA, 20 bp, synthetic construct
  source 1..20: mol_type = other DNA
ctaaaacttcccatggagaa

SEQ ID NO: 156025 - DNA, 20 bp, synthetic construct
  source 1..20: mol_type = other DNA
gctaaaacttcccatggaga

SEQ ID NO: 156026 - DNA, 20 bp, synthetic construct
  source 1..20: mol_type = other DNA
tgctaaaacttcccatggag

SEQ ID NO: 156027 - DNA, 20 bp, synthetic construct
  source 1..20: mol_type = other DNA
ctgctaaaacttcccatgga

SEQ ID NO: 156028 - DNA, 20 bp, synthetic construct
  source 1..20: mol_type = other DNA
actgctaaaacttcccatgg

SEQ ID NO: 156029 - DNA, 20 bp, synthetic construct
  source 1..20: mol_type = other DNA
cactgctaaaacttcccatg

SEQ ID NO: 156030 - DNA, 20 bp, synthetic construct
  source 1..20: mol_type = other DNA
acactgctaaaacttcccat

SEQ ID NO: 156031 - DNA, 20 bp, synthetic construct
  source 1..20: mol_type = other DNA
aacactgctaaaacttccca

SEQ ID NO: 156032 - DNA, 20 bp, synthetic construct
  source 1..20: mol_type = other DNA
aaacactgctaaaacttccc

SEQ ID NO: 156033 - DNA, 20 bp, synthetic construct
  source 1..20: mol_type = other DNA
gaaacactgctaaaacttcc

SEQ ID NO: 156034 - DNA, 20 bp, synthetic construct
  source 1..20: mol_type = other DNA
agaaacactgctaaaacttc

SEQ ID NO: 156035 - DNA, 20 bp, synthetic construct
  source 1..20: mol_type = other DNA
aagaaacactgctaaaactt

SEQ ID NO: 156036 - DNA, 20 bp, synthetic construct
  source 1..20: mol_type = other DNA
aaagaaacactgctaaaact

SEQ ID NO: 156037 - DNA, 20 bp, synthetic construct
  source 1..20: mol_type = other DNA
aaaagaaacactgctaaaac

SEQ ID NO: 156038 - DNA, 20 bp, synthetic construct
  source 1..20: mol_type = other DNA
aaaaagaaacactgctaaaa

SEQ ID NO: 156039 - DNA, 20 bp, synthetic construct
  source 1..20: mol_type = other DNA
taaaaagaaacactgctaaa

SEQ ID NO: 156040 - DNA, 20 bp, synthetic construct
  source 1..20: mol_type = other DNA
ctaaaaagaaacactgctaa

SEQ ID NO: 156041 - DNA, 20 bp, synthetic construct
  source 1..20: mol_type = other DNA
tctaaaaagaaacactgcta

SEQ ID NO: 156042 - DNA, 20 bp, synthetic construct
  source 1..20: mol_type = other DNA
ttctaaaaagaaacactgct

SEQ ID NO: 156043 - DNA, 20 bp, synthetic construct
  source 1..20: mol_type = other DNA
attctaaaaagaaacactgc

SEQ ID NO: 156044 - DNA, 20 bp, synthetic construct
  source 1..20: mol_type = other DNA
cattctaaaaagaaacactg

SEQ ID NO: 156045 - DNA, 20 bp, synthetic construct
  source 1..20: mol_type = other DNA
acattctaaaaagaaacact

SEQ ID NO: 156046 - DNA, 20 bp, synthetic construct
  source 1..20: mol_type = other DNA
tacattctaaaaagaaacac

SEQ ID NO: 156047 - DNA, 20 bp, synthetic construct
  source 1..20: mol_type = other DNA
atacattctaaaaagaaaca

SEQ ID NO: 156048 - DNA, 20 bp, synthetic construct
  source 1..20: mol_type = other DNA
aatacattctaaaaagaaac

SEQ ID NO: 156049 - DNA, 20 bp, synthetic construct
  source 1..20: mol_type = other DNA
aaatacattctaaaaagaaa

SEQ ID NO: 156050 - DNA, 20 bp, synthetic construct
  source 1..20: mol_type = other DNA
caaatacattctaaaaagaa

SEQ ID NO: 156051 - DNA, 20 bp, synthetic construct
  source 1..20: mol_type = other DNA
ccaaatacattctaaaaaga

SEQ ID NO: 156052 - DNA, 20 bp, synthetic construct
  source 1..20: mol_type = other DNA
cccaaatacattctaaaaag

SEQ ID NO: 156053 - DNA, 20 bp, synthetic construct
  source 1..20: mol_type = other DNA
tcccaaatacattctaaaaa

SEQ ID NO: 156054 - DNA, 20 bp, synthetic construct
  source 1..20: mol_type = other DNA
ttcccaaatacattctaaaa

SEQ ID NO: 156055 - DNA, 20 bp, synthetic construct
  source 1..20: mol_type = other DNA
gttcccaaatacattctaaa

SEQ ID NO: 156056 - DNA, 20 bp, synthetic construct
  source 1..20: mol_type = other DNA
agttcccaaatacattctaa

SEQ ID NO: 156057 - DNA, 20 bp, synthetic construct
  source 1..20: mol_type = other DNA
aagttcccaaatacattcta

SEQ ID NO: 156058 - DNA, 20 bp, synthetic construct
  source 1..20: mol_type = other DNA
aaagttcccaaatacattct

SEQ ID NO: 156059 - DNA, 20 bp, synthetic construct
  source 1..20: mol_type = other DNA
taaagttcccaaatacattc

SEQ ID NO: 156060 - DNA, 20 bp, synthetic construct
  source 1..20: mol_type = other DNA
ttaaagttcccaaatacatt

SEQ ID NO: 156061 - DNA, 20 bp, synthetic construct
  source 1..20: mol_type = other DNA
attaaagttcccaaatacat

SEQ ID NO: 156062 - DNA, 20 bp, synthetic construct
  source 1..20: mol_type = other DNA
aattaaagttcccaaataca

SEQ ID NO: 156063 - DNA, 20 bp, synthetic construct
  source 1..20: mol_type = other DNA
gaattaaagttcccaaatac

SEQ ID NO: 156064 - DNA, 20 bp, synthetic construct
  source 1..20: mol_type = other DNA
tgaattaaagttcccaaata

SEQ ID NO: 156065 - DNA, 20 bp, synthetic construct
  source 1..20: mol_type = other DNA
atgaattaaagttcccaaat

SEQ ID NO: 156066 - DNA, 20 bp, synthetic construct
  source 1..20: mol_type = other DNA
tatgaattaaagttcccaaa

SEQ ID NO: 156067 - DNA, 20 bp, synthetic construct
  source 1..20: mol_type = other DNA
ttatgaattaaagttcccaa

SEQ ID NO: 156068 - DNA, 20 bp, synthetic construct
  source 1..20: mol_type = other DNA
attatgaattaaagttccca

SEQ ID NO: 156069 - DNA, 20 bp, synthetic construct
  source 1..20: mol_type = other DNA
aattatgaattaaagttccc

SEQ ID NO: 156070 - DNA, 20 bp, synthetic construct
  source 1..20: mol_type = other DNA
aaattatgaattaaagttcc

SEQ ID NO: 156071 - DNA, 20 bp, synthetic construct
  source 1..20: mol_type = other DNA
taaattatgaattaaagttc

SEQ ID NO: 156072 - DNA, 20 bp, synthetic construct
  source 1..20: mol_type = other DNA
ctaaattatgaattaaagtt

SEQ ID NO: 156073 - DNA, 20 bp, synthetic construct
  source 1..20: mol_type = other DNA
gctaaattatgaattaaagt

SEQ ID NO: 156074 - DNA, 20 bp, synthetic construct
  source 1..20: mol_type = other DNA
agctaaattatgaattaaag

SEQ ID NO: 156075 - DNA, 20 bp, synthetic construct
  source 1..20: mol_type = other DNA
aagctaaattatgaattaaa

SEQ ID NO: 156076 - DNA, 20 bp, synthetic construct
  source 1..20: mol_type = other DNA
aaagctaaattatgaattaa

SEQ ID NO: 156077 - DNA, 20 bp, synthetic construct
  source 1..20: mol_type = other DNA
aaaagctaaattatgaatta

SEQ ID NO: 156078 - DNA, 20 bp, synthetic construct
  source 1..20: mol_type = other DNA
aaaaagctaaattatgaatt

SEQ ID NO: 156079 - DNA, 20 bp, synthetic construct
  source 1..20: mol_type = other DNA
aaaaaagctaaattatgaat

SEQ ID NO: 156080 - DNA, 20 bp, synthetic construct
  source 1..20: mol_type = other DNA
aaaaaaagctaaattatgaa

SEQ ID NO: 156081 - DNA, 20 bp, synthetic construct
  source 1..20: mol_type = other DNA
aaaaaaaagctaaattatga

SEQ ID NO: 156082 - DNA, 20 bp, synthetic construct
  source 1..20: mol_type = other DNA
gaaaaaaaagctaaattatg

SEQ ID NO: 156083 - DNA, 20 bp, synthetic construct
  source 1..20: mol_type = other DNA
agaaaaaaaagctaaattat

SEQ ID NO: 156084 - DNA, 20 bp, synthetic construct
  source 1..20: mol_type = other DNA
aagaaaaaaaagctaaatta

SEQ ID NO: 156085 - DNA, 20 bp, synthetic construct
  source 1..20: mol_type = other DNA
gaagaaaaaaaagctaaatt

SEQ ID NO: 156086 - DNA, 20 bp, synthetic construct
  source 1..20: mol_type = other DNA
agaagaaaaaaaagctaaat

SEQ ID NO: 156087 - DNA, 20 bp, synthetic construct
  source 1..20: mol_type = other DNA
aagaagaaaaaaaagctaaa

SEQ ID NO: 156088 - DNA, 20 bp, synthetic construct
  source 1..20: mol_type = other DNA
gaagaagaaaaaaaagctaa

SEQ ID NO: 156089 - DNA, 20 bp, synthetic construct
  source 1..20: mol_type = other DNA
agaagaagaaaaaaaagcta

SEQ ID NO: 156090 - DNA, 20 bp, synthetic construct
  source 1..20: mol_type = other DNA
aagaagaagaaaaaaaagct

SEQ ID NO: 156091 - DNA, 20 bp, synthetic construct
  source 1..20: mol_type = other DNA
taagaagaagaaaaaaaagc

SEQ ID NO: 156092 - DNA, 20 bp, synthetic construct
  source 1..20: mol_type = other DNA
ataagaagaagaaaaaaaag

SEQ ID NO: 156093 - DNA, 20 bp, synthetic construct
  source 1..20: mol_type = other DNA
tataagaagaagaaaaaaaa

SEQ ID NO: 156094 - DNA, 20 bp, synthetic construct
  source 1..20: mol_type = other DNA
ttataagaagaagaaaaaaa

SEQ ID NO: 156095 - DNA, 20 bp, synthetic construct
  source 1..20: mol_type = other DNA
tttataagaagaagaaaaaa

SEQ ID NO: 156096 - DNA, 20 bp, synthetic construct
  source 1..20: mol_type = other DNA
atttataagaagaagaaaaa

SEQ ID NO: 156097 - DNA, 20 bp, synthetic construct
  source 1..20: mol_type = other DNA
tatttataagaagaagaaaa

SEQ ID NO: 156098 - DNA, 20 bp, synthetic construct
  source 1..20: mol_type = other DNA
ctatttataagaagaagaaa

SEQ ID NO: 156099 - DNA, 20 bp, synthetic construct
  source 1..20: mol_type = other DNA
cctatttataagaagaagaa

SEQ ID NO: 156100 - DNA, 20 bp, synthetic construct
  source 1..20: mol_type = other DNA
gcctatttataagaagaaga

SEQ ID NO: 156101 - DNA, 20 bp, synthetic construct
  source 1..20: mol_type = other DNA
agcctatttataagaagaag

SEQ ID NO: 156102 - DNA, 20 bp, synthetic construct
  source 1..20: mol_type = other DNA
cagcctatttataagaagaa

SEQ ID NO: 156103 - DNA, 20 bp, synthetic construct
  source 1..20: mol_type = other DNA
acagcctatttataagaaga

SEQ ID NO: 156104 - DNA, 20 bp, synthetic construct
  source 1..20: mol_type = other DNA
tacagcctatttataagaag

SEQ ID NO: 156105 - DNA, 20 bp, synthetic construct
  source 1..20: mol_type = other DNA
gtacagcctatttataagaa

SEQ ID NO: 156106 - DNA, 20 bp, synthetic construct
  source 1..20: mol_type = other DNA
ggtacagcctatttataaga

SEQ ID NO: 156107 - DNA, 20 bp, synthetic construct
  source 1..20: mol_type = other DNA
tggtacagcctatttataag

SEQ ID NO: 156108 - DNA, 20 bp, synthetic construct
  source 1..20: mol_type = other DNA
ctggtacagcctatttataa

SEQ ID NO: 156109 - DNA, 20 bp, synthetic construct
  source 1..20: mol_type = other DNA
actggtacagcctatttata

SEQ ID NO: 156110 - DNA, 20 bp, synthetic construct
  source 1..20: mol_type = other DNA
cactggtacagcctatttat

SEQ ID NO: 156111 - DNA, 20 bp, synthetic construct
  source 1..20: mol_type = other DNA
gcactggtacagcctattta

SEQ ID NO: 156112 - DNA, 20 bp, synthetic construct
  source 1..20: mol_type = other DNA
tgcactggtacagcctattt

SEQ ID NO: 156113 - DNA, 20 bp, synthetic construct
  source 1..20: mol_type = other DNA
ctgcactggtacagcctatt

SEQ ID NO: 156114 - DNA, 20 bp, synthetic construct
  source 1..20: mol_type = other DNA
cctgcactggtacagcctat

SEQ ID NO: 156115 - DNA, 20 bp, synthetic construct
  source 1..20: mol_type = other DNA
acctgcactggtacagccta

SEQ ID NO: 156116 - DNA, 20 bp, synthetic construct
  source 1..20: mol_type = other DNA
gacctgcactggtacagcct

SEQ ID NO: 156117 - DNA, 20 bp, synthetic construct
  source 1..20: mol_type = other DNA
ggacctgcactggtacagcc

SEQ ID NO: 156118 - DNA, 20 bp, synthetic construct
  source 1..20: mol_type = other DNA
aggacctgcactggtacagc

SEQ ID NO: 156119 - DNA, 20 bp, synthetic construct
  source 1..20: mol_type = other DNA
gaggacctgcactggtacag

SEQ ID NO: 156120 - DNA, 20 bp, synthetic construct
  source 1..20: mol_type = other DNA
tgaggacctgcactggtaca

SEQ ID NO: 156121 - DNA, 20 bp, synthetic construct
  source 1..20: mol_type = other DNA
gtgaggacctgcactggtac

SEQ ID NO: 156122 - DNA, 20 bp, synthetic construct
  source 1..20: mol_type = other DNA
agtgaggacctgcactggta

SEQ ID NO: 156123 - DNA, 20 bp, synthetic construct
  source 1..20: mol_type = other DNA
aagtgaggacctgcactggt

SEQ ID NO: 156124 - DNA, 20 bp, synthetic construct
  source 1..20: mol_type = other DNA
aaagtgaggacctgcactgg

SEQ ID NO: 156125 - DNA, 20 bp, synthetic construct
  source 1..20: mol_type = other DNA
taaagtgaggacctgcactg

SEQ ID NO: 156126 - DNA, 20 bp, synthetic construct
  source 1..20: mol_type = other DNA
ttaaagtgaggacctgcact

SEQ ID NO: 156127 - DNA, 20 bp, synthetic construct
  source 1..20: mol_type = other DNA
attaaagtgaggacctgcac

SEQ ID NO: 156128 - DNA, 20 bp, synthetic construct
  source 1..20: mol_type = other DNA
gattaaagtgaggacctgca

SEQ ID NO: 156129 - DNA, 20 bp, synthetic construct
  source 1..20: mol_type = other DNA
ggattaaagtgaggacctgc

SEQ ID NO: 156130 - DNA, 20 bp, synthetic construct
  source 1..20: mol_type = other DNA
aggattaaagtgaggacctg

SEQ ID NO: 156131 - DNA, 20 bp, synthetic construct
  source 1..20: mol_type = other DNA
gaggattaaagtgaggacct

SEQ ID NO: 156132 - DNA, 20 bp, synthetic construct
  source 1..20: mol_type = other DNA
agaggattaaagtgaggacc

SEQ ID NO: 156133 - DNA, 20 bp, synthetic construct
  source 1..20: mol_type = other DNA
tagaggattaaagtgaggac

SEQ ID NO: 156134 - DNA, 20 bp, synthetic construct
  source 1..20: mol_type = other DNA
atagaggattaaagtgagga

SEQ ID NO: 156135 - DNA, 20 bp, synthetic construct
  source 1..20: mol_type = other DNA
gatagaggattaaagtgagg

SEQ ID NO: 156136 - DNA, 20 bp, synthetic construct
  source 1..20: mol_type = other DNA
ggatagaggattaaagtgag

SEQ ID NO: 156137 - DNA, 20 bp, synthetic construct
  source 1..20: mol_type = other DNA
tggatagaggattaaagtga

SEQ ID NO: 156138 - DNA, 20 bp, synthetic construct
  source 1..20: mol_type = other DNA
ctggatagaggattaaagtg

SEQ ID NO: 156139 - DNA, 20 bp, synthetic construct
  source 1..20: mol_type = other DNA
tctggatagaggattaaagt

SEQ ID NO: 156140 - DNA, 20 bp, synthetic construct
  source 1..20: mol_type = other DNA
ttctggatagaggattaaag

SEQ ID NO: 156141 - DNA, 20 bp, synthetic construct
  source 1..20: mol_type = other DNA
tttctggatagaggattaaa

SEQ ID NO: 156142 - DNA, 20 bp, synthetic construct
  source 1..20: mol_type = other DNA
ttttctggatagaggattaa

SEQ ID NO: 156143 - DNA, 20 bp, synthetic construct
  source 1..20: mol_type = other DNA
gttttctggatagaggatta

SEQ ID NO: 156144 - DNA, 20 bp, synthetic construct
  source 1..20: mol_type = other DNA
tgttttctggatagaggatt

SEQ ID NO: 156145 - DNA, 20 bp, synthetic construct
  source 1..20: mol_type = other DNA
gtgttttctggatagaggat

SEQ ID NO: 156146 - DNA, 20 bp, synthetic construct
  source 1..20: mol_type = other DNA
cgtgttttctggatagagga

SEQ ID NO: 156147 - DNA, 20 bp, synthetic construct
  source 1..20: mol_type = other DNA
ccgtgttttctggatagagg

SEQ ID NO: 156148 - DNA, 20 bp, synthetic construct
  source 1..20: mol_type = other DNA
accgtgttttctggatagag

SEQ ID NO: 156149 - DNA, 20 bp, synthetic construct
  source 1..20: mol_type = other DNA
caccgtgttttctggataga

SEQ ID NO: 156150 - DNA, 20 bp, synthetic construct
  source 1..20: mol_type = other DNA
ccaccgtgttttctggatag

SEQ ID NO: 156151 - DNA, 20 bp, synthetic construct
  source 1..20: mol_type = other DNA
cccaccgtgttttctggata

SEQ ID NO: 156152 - DNA, 20 bp, synthetic construct
  source 1..20: mol_type = other DNA
gcccaccgtgttttctggat

SEQ ID NO: 156153 - DNA, 20 bp, synthetic construct
  source 1..20: mol_type = other DNA
ggcccaccgtgttttctgga

SEQ ID NO: 156154 - DNA, 20 bp, synthetic construct
  source 1..20: mol_type = other DNA
tggcccaccgtgttttctgg

SEQ ID NO: 156155 - DNA, 20 bp, synthetic construct
  source 1..20: mol_type = other DNA
ttggcccaccgtgttttctg

SEQ ID NO: 156156 - DNA, 20 bp, synthetic construct
  source 1..20: mol_type = other DNA
tttggcccaccgtgttttct

SEQ ID NO: 156157 - DNA, 20 bp, synthetic construct
  source 1..20: mol_type = other DNA
ctttggcccaccgtgttttc

SEQ ID NO: 156158 - DNA, 20 bp, synthetic construct
  source 1..20: mol_type = other DNA
cctttggcccaccgtgtttt

SEQ ID NO: 156159 - DNA, 20 bp, synthetic construct
  source 1..20: mol_type = other DNA
tcctttggcccaccgtgttt

SEQ ID NO: 156160 - DNA, 20 bp, synthetic construct
  source 1..20: mol_type = other DNA
atcctttggcccaccgtgtt

SEQ ID NO: 156161 - DNA, 20 bp, synthetic construct
  source 1..20: mol_type = other DNA
catcctttggcccaccgtgt

SEQ ID NO: 156162 - DNA, 20 bp, synthetic construct
  source 1..20: mol_type = other DNA
tcatcctttggcccaccgtg

SEQ ID NO: 156163 - DNA, 20 bp, synthetic construct
  source 1..20: mol_type = other DNA
ttcatcctttggcccaccgt

SEQ ID NO: 156164 - DNA, 20 bp, synthetic construct
  source 1..20: mol_type = other DNA
cttcatcctttggcccaccg

SEQ ID NO: 156165 - DNA, 20 bp, synthetic construct
  source 1..20: mol_type = other DNA
tcttcatcctttggcccacc

SEQ ID NO: 156166 - DNA, 20 bp, synthetic construct
  source 1..20: mol_type = other DNA
ctcttcatcctttggcccac

SEQ ID NO: 156167 - DNA, 20 bp, synthetic construct
  source 1..20: mol_type = other DNA
tctcttcatcctttggccca

SEQ ID NO: 156168 - DNA, 20 bp, synthetic construct
  source 1..20: mol_type = other DNA
ctctcttcatcctttggccc

SEQ ID NO: 156169 - DNA, 20 bp, synthetic construct
  source 1..20: mol_type = other DNA
cctctcttcatcctttggcc

SEQ ID NO: 156170 - DNA, 20 bp, synthetic construct
  source 1..20: mol_type = other DNA
acctctcttcatcctttggc

SEQ ID NO: 156171 - DNA, 20 bp, synthetic construct
  source 1..20: mol_type = other DNA
tacctctcttcatcctttgg

SEQ ID NO: 156172 - DNA, 20 bp, synthetic construct
  source 1..20: mol_type = other DNA
ttacctctcttcatcctttg

SEQ ID NO: 156173 - DNA, 20 bp, synthetic construct
  source 1..20: mol_type = other DNA
gttacctctcttcatccttt

SEQ ID NO: 156174 - DNA, 20 bp, synthetic construct
  source 1..20: mol_type = other DNA
tgttacctctcttcatcctt

SEQ ID NO: 156175 - DNA, 20 bp, synthetic construct
  source 1..20: mol_type = other DNA
ttgttacctctcttcatcct

SEQ ID NO: 156176 - DNA, 20 bp, synthetic construct
  source 1..20: mol_type = other DNA
cttgttacctctcttcatcc

SEQ ID NO: 156177 - DNA, 20 bp, synthetic construct
  source 1..20: mol_type = other DNA
tcttgttacctctcttcatc

SEQ ID NO: 156178 - DNA, 20 bp, synthetic construct
  source 1..20: mol_type = other DNA
atcttgttacctctcttcat

SEQ ID NO: 156179 - DNA, 20 bp, synthetic construct
  source 1..20: mol_type = other DNA
catcttgttacctctcttca

SEQ ID NO: 156180 - DNA, 20 bp, synthetic construct
  source 1..20: mol_type = other DNA
gcatcttgttacctctcttc

SEQ ID NO: 156181 - DNA, 20 bp, synthetic construct
  source 1..20: mol_type = other DNA
agcatcttgttacctctctt

SEQ ID NO: 156182 - DNA, 20 bp, synthetic construct
  source 1..20: mol_type = other DNA
aagcatcttgttacctctct

SEQ ID NO: 156183 - DNA, 20 bp, synthetic construct
  source 1..20: mol_type = other DNA
taagcatcttgttacctctc

SEQ ID NO: 156184 - DNA, 20 bp, synthetic construct
  source 1..20: mol_type = other DNA
ttaagcatcttgttacctct

SEQ ID NO: 156185 - DNA, 20 bp, synthetic construct
  source 1..20: mol_type = other DNA
gttaagcatcttgttacctc

SEQ ID NO: 156186 - DNA, 20 bp, synthetic construct
  source 1..20: mol_type = other DNA
agttaagcatcttgttacct

SEQ ID NO: 156187 - DNA, 20 bp, synthetic construct
  source 1..20: mol_type = other DNA
gagttaagcatcttgttacc

SEQ ID NO: 156188 - DNA, 20 bp, synthetic construct
  source 1..20: mol_type = other DNA
agagttaagcatcttgttac

SEQ ID NO: 156189 - DNA, 20 bp, synthetic construct
  source 1..20: mol_type = other DNA
aagagttaagcatcttgtta

SEQ ID NO: 156190 - DNA, 20 bp, synthetic construct
  source 1..20: mol_type = other DNA
caagagttaagcatcttgtt

SEQ ID NO: 156191 - DNA, 20 bp, synthetic construct
  source 1..20: mol_type = other DNA
acaagagttaagcatcttgt

SEQ ID NO: 156192 - DNA, 20 bp, synthetic construct
  source 1..20: mol_type = other DNA
tacaagagttaagcatcttg

SEQ ID NO: 156193 - DNA, 20 bp, synthetic construct
  source 1..20: mol_type = other DNA
ttacaagagttaagcatctt

SEQ ID NO: 156194 - DNA, 20 bp, synthetic construct
  source 1..20: mol_type = other DNA
attacaagagttaagcatct

SEQ ID NO: 156195 - DNA, 20 bp, synthetic construct
  source 1..20: mol_type = other DNA
tattacaagagttaagcatc

SEQ ID NO: 156196 - DNA, 20 bp, synthetic construct
  source 1..20: mol_type = other DNA
ttattacaagagttaagcat

SEQ ID NO: 156197 - DNA, 20 bp, synthetic construct
  source 1..20: mol_type = other DNA
attattacaagagttaagca

SEQ ID NO: 156198 - DNA, 20 bp, synthetic construct
  source 1..20: mol_type = other DNA
cattattacaagagttaagc

SEQ ID NO: 156199 - DNA, 20 bp, synthetic construct
  source 1..20: mol_type = other DNA
ccattattacaagagttaag

SEQ ID NO: 156200 - DNA, 20 bp, synthetic construct
  source 1..20: mol_type = other DNA
gccattattacaagagttaa

SEQ ID NO: 156201 - DNA, 20 bp, synthetic construct
  source 1..20: mol_type = other DNA
cgccattattacaagagtta

SEQ ID NO: 156202 - DNA, 20 bp, synthetic construct
  source 1..20: mol_type = other DNA
tcgccattattacaagagtt

SEQ ID NO: 156203 - DNA, 20 bp, synthetic construct
  source 1..20: mol_type = other DNA
atcgccattattacaagagt

SEQ ID NO: 156204 - DNA, 20 bp, synthetic construct
  source 1..20: mol_type = other DNA
tatcgccattattacaagag

SEQ ID NO: 156205 - DNA, 20 bp, synthetic construct
  source 1..20: mol_type = other DNA
ctatcgccattattacaaga

SEQ ID NO: 156206 - DNA, 20 bp, synthetic construct
  source 1..20: mol_type = other DNA
gctatcgccattattacaag

SEQ ID NO: 156207 - DNA, 20 bp, synthetic construct
  source 1..20: mol_type = other DNA
agctatcgccattattacaa

SEQ ID NO: 156208 - DNA, 20 bp, synthetic construct
  source 1..20: mol_type = other DNA
aagctatcgccattattaca

SEQ ID NO: 156209 - DNA, 20 bp, synthetic construct
  source 1..20: mol_type = other DNA
aaagctatcgccattattac

SEQ ID NO: 156210 - DNA, 20 bp, synthetic construct
  source 1..20: mol_type = other DNA
gaaagctatcgccattatta

SEQ ID NO: 156211 - DNA, 20 bp, synthetic construct
  source 1..20: mol_type = other DNA
agaaagctatcgccattatt

SEQ ID NO: 156212 - DNA, 20 bp, synthetic construct
  source 1..20: mol_type = other DNA
cagaaagctatcgccattat

SEQ ID NO: 156213 - DNA, 20 bp, synthetic construct
  source 1..20: mol_type = other DNA
ccagaaagctatcgccatta

SEQ ID NO: 156214 - DNA, 20 bp, synthetic construct
  source 1..20: mol_type = other DNA
tccagaaagctatcgccatt

SEQ ID NO: 156215 - DNA, 20 bp, synthetic construct
  source 1..20: mol_type = other DNA
ctccagaaagctatcgccat

SEQ ID NO: 156216 - DNA, 20 bp, synthetic construct
  source 1..20: mol_type = other DNA
actccagaaagctatcgcca

SEQ ID NO: 156217 - DNA, 20 bp, synthetic construct
  source 1..20: mol_type = other DNA
aactccagaaagctatcgcc

SEQ ID NO: 156218 - DNA, 20 bp, synthetic construct
  source 1..20: mol_type = other DNA
gaactccagaaagctatcgc

SEQ ID NO: 156219 - DNA, 20 bp, synthetic construct
  source 1..20: mol_type = other DNA
tgaactccagaaagctatcg

SEQ ID NO: 156220 - DNA, 20 bp, synthetic construct
  source 1..20: mol_type = other DNA
atgaactccagaaagctatc

SEQ ID NO: 156221 - DNA, 20 bp, synthetic construct
  source 1..20: mol_type = other DNA
tatgaactccagaaagctat

SEQ ID NO: 156222 - DNA, 20 bp, synthetic construct
  source 1..20: mol_type = other DNA
atatgaactccagaaagcta

SEQ ID NO: 156223 - DNA, 20 bp, synthetic construct
  source 1..20: mol_type = other DNA
catatgaactccagaaagct

SEQ ID NO: 156224 - DNA, 20 bp, synthetic construct
  source 1..20: mol_type = other DNA
ccatatgaactccagaaagc

SEQ ID NO: 156225 - DNA, 20 bp, synthetic construct
  source 1..20: mol_type = other DNA
accatatgaactccagaaag

SEQ ID NO: 156226 - DNA, 20 bp, synthetic construct
  source 1..20: mol_type = other DNA
taccatatgaactccagaaa

SEQ ID NO: 156227 - DNA, 20 bp, synthetic construct
  source 1..20: mol_type = other DNA
ataccatatgaactccagaa

SEQ ID NO: 156228 - DNA, 20 bp, synthetic construct
  source 1..20: mol_type = other DNA
tataccatatgaactccaga

SEQ ID NO: 156229 - DNA, 20 bp, synthetic construct
  source 1..20: mol_type = other DNA
gtataccatatgaactccag

SEQ ID NO: 156230 - DNA, 20 bp, synthetic construct
  source 1..20: mol_type = other DNA
agtataccatatgaactcca

SEQ ID NO: 156231 - DNA, 20 bp, synthetic construct
  source 1..20: mol_type = other DNA
tagtataccatatgaactcc

SEQ ID NO: 156232 - DNA, 20 bp, synthetic construct
  source 1..20: mol_type = other DNA
gtagtataccatatgaactc

SEQ ID NO: 156233 - DNA, 20 bp, synthetic construct
  source 1..20: mol_type = other DNA
agtagtataccatatgaact

SEQ ID NO: 156234 - DNA, 20 bp, synthetic construct
  source 1..20: mol_type = other DNA
aagtagtataccatatgaac

SEQ ID NO: 156235 - DNA, 20 bp, synthetic construct
  source 1..20: mol_type = other DNA
caagtagtataccatatgaa

SEQ ID NO: 156236 - DNA, 20 bp, synthetic construct
  source 1..20: mol_type = other DNA
acaagtagtataccatatga

SEQ ID NO: 156237 - DNA, 20 bp, synthetic construct
  source 1..20: mol_type = other DNA
tacaagtagtataccatatg

SEQ ID NO: 156238 - DNA, 20 bp, synthetic construct
  source 1..20: mol_type = other DNA
ttacaagtagtataccatat

SEQ ID NO: 156239 - DNA, 20 bp, synthetic construct
  source 1..20: mol_type = other DNA
tttacaagtagtataccata

SEQ ID NO: 156240 - DNA, 20 bp, synthetic construct
  source 1..20: mol_type = other DNA
atttacaagtagtataccat

SEQ ID NO: 156241 - DNA, 20 bp, synthetic construct
  source 1..20: mol_type = other DNA
tatttacaagtagtatacca

SEQ ID NO: 156242 - DNA, 20 bp, synthetic construct
  source 1..20: mol_type = other DNA
atatttacaagtagtatacc

SEQ ID NO: 156243 - DNA, 20 bp, synthetic construct
  source 1..20: mol_type = other DNA
catatttacaagtagtatac

SEQ ID NO: 156244 - DNA, 20 bp, synthetic construct
  source 1..20: mol_type = other DNA
acatatttacaagtagtata

SEQ ID NO: 156245 - DNA, 20 bp, synthetic construct
  source 1..20: mol_type = other DNA
cacatatttacaagtagtat

SEQ ID NO: 156246 - DNA, 20 bp, synthetic construct
  source 1..20: mol_type = other DNA
gcacatatttacaagtagta

SEQ ID NO: 156247 - DNA, 20 bp, synthetic construct
  source 1..20: mol_type = other DNA
agcacatatttacaagtagt

SEQ ID NO: 156248 - DNA, 20 bp, synthetic construct
  source 1..20: mol_type = other DNA
tagcacatatttacaagtag

SEQ ID NO: 156249 - DNA, 20 bp, synthetic construct
  source 1..20: mol_type = other DNA
ttagcacatatttacaagta

SEQ ID NO: 156250 - DNA, 20 bp, synthetic construct
  source 1..20: mol_type = other DNA
cttagcacatatttacaagt

SEQ ID NO: 156251 - DNA, 20 bp, synthetic construct
  source 1..20: mol_type = other DNA
tcttagcacatatttacaag

SEQ ID NO: 156252 - DNA, 20 bp, synthetic construct
  source 1..20: mol_type = other DNA
atcttagcacatatttacaa

SEQ ID NO: 156253 - DNA, 20 bp, synthetic construct
  source 1..20: mol_type = other DNA
tatcttagcacatatttaca

SEQ ID NO: 156254 - DNA, 20 bp, synthetic construct
  source 1..20: mol_type = other DNA
ttatcttagcacatatttac

SEQ ID NO: 156255 - DNA, 20 bp, synthetic construct
  source 1..20: mol_type = other DNA
attatcttagcacatattta

SEQ ID NO: 156256 - DNA, 20 bp, synthetic construct
  source 1..20: mol_type = other DNA
aattatcttagcacatattt

SEQ ID NO: 156257 - DNA, 20 bp, synthetic construct
  source 1..20: mol_type = other DNA
gaattatcttagcacatatt

SEQ ID NO: 156258 - DNA, 20 bp, synthetic construct
  source 1..20: mol_type = other DNA
ggaattatcttagcacatat

SEQ ID NO: 156259 - DNA, 20 bp, synthetic construct
  source 1..20: mol_type = other DNA
cggaattatcttagcacata

SEQ ID NO: 156260 - DNA, 20 bp, synthetic construct
  source 1..20: mol_type = other DNA
acggaattatcttagcacat

SEQ ID NO: 156261 - DNA, 20 bp, synthetic construct
  source 1..20: mol_type = other DNA
cacggaattatcttagcaca

SEQ ID NO: 156262 - DNA, 20 bp, synthetic construct
  source 1..20: mol_type = other DNA
acacggaattatcttagcac

SEQ ID NO: 156263 - DNA, 20 bp, synthetic construct
  source 1..20: mol_type = other DNA
aacacggaattatcttagca

SEQ ID NO: 156264 - DNA, 20 bp, synthetic construct
  source 1..20: mol_type = other DNA
aaacacggaattatcttagc

SEQ ID NO: 156265 - DNA, 20 bp, synthetic construct
  source 1..20: mol_type = other DNA
gaaacacggaattatcttag

SEQ ID NO: 156266 - DNA, 20 bp, synthetic construct
  source 1..20: mol_type = other DNA
ggaaacacggaattatctta

SEQ ID NO: 156267 - DNA, 20 bp, synthetic construct
  source 1..20: mol_type = other DNA
gggaaacacggaattatctt

SEQ ID NO: 156268 - DNA, 20 bp, synthetic construct
  source 1..20: mol_type = other DNA
ggggaaacacggaattatct

SEQ ID NO: 156269 - DNA, 20 bp, synthetic construct
  source 1..20: mol_type = other DNA
gggggaaacacggaattatc

SEQ ID NO: 156270 - DNA, 20 bp, synthetic construct
  source 1..20: mol_type = other DNA
tgggggaaacacggaattat

SEQ ID NO: 156271 - DNA, 20 bp, synthetic construct
  source 1..20: mol_type = other DNA
gtgggggaaacacggaatta

SEQ ID NO: 156272 - DNA, 20 bp, synthetic construct
  source 1..20: mol_type = other DNA
ggtgggggaaacacggaatt

SEQ ID NO: 156273 - DNA, 20 bp, synthetic construct
  source 1..20: mol_type = other DNA
aggtgggggaaacacggaat

SEQ ID NO: 156274 - DNA, 20 bp, synthetic construct
  source 1..20: mol_type = other DNA
aaggtgggggaaacacggaa

SEQ ID NO: 156275 - DNA, 20 bp, synthetic construct
  source 1..20: mol_type = other DNA
aaaggtgggggaaacacgga

SEQ ID NO: 156276 - DNA, 20 bp, synthetic construct
  source 1..20: mol_type = other DNA
caaaggtgggggaaacacgg

SEQ ID NO: 156277 - DNA, 20 bp, synthetic construct
  source 1..20: mol_type = other DNA
gcaaaggtgggggaaacacg

SEQ ID NO: 156278 - DNA, 20 bp, synthetic construct
  source 1..20: mol_type = other DNA
agcaaaggtgggggaaacac

SEQ ID NO: 156279 - DNA, 20 bp, synthetic construct
  source 1..20: mol_type = other DNA
aagcaaaggtgggggaaaca

SEQ ID NO: 156280 - DNA, 20 bp, synthetic construct
  source 1..20: mol_type = other DNA
aaagcaaaggtgggggaaac

SEQ ID NO: 156281 - DNA, 20 bp, synthetic construct
  source 1..20: mol_type = other DNA
aaaagcaaaggtgggggaaa

SEQ ID NO: 156282 - DNA, 20 bp, synthetic construct
  source 1..20: mol_type = other DNA
caaaagcaaaggtgggggaa

SEQ ID NO: 156283 - DNA, 20 bp, synthetic construct
  source 1..20: mol_type = other DNA
tcaaaagcaaaggtggggga

SEQ ID NO: 156284 - DNA, 20 bp, synthetic construct
  source 1..20: mol_type = other DNA
ttcaaaagcaaaggtggggg

SEQ ID NO: 156285 - DNA, 20 bp, synthetic construct
  source 1..20: mol_type = other DNA
gttcaaaagcaaaggtgggg

SEQ ID NO: 156286 - DNA, 20 bp, synthetic construct
  source 1..20: mol_type = other DNA
agttcaaaagcaaaggtggg

SEQ ID NO: 156287 - DNA, 20 bp, synthetic construct
  source 1..20: mol_type = other DNA
aagttcaaaagcaaaggtgg

SEQ ID NO: 156288 - DNA, 20 bp, synthetic construct
  source 1..20: mol_type = other DNA
caagttcaaaagcaaaggtg

SEQ ID NO: 156289 - DNA, 20 bp, synthetic construct
  source 1..20: mol_type = other DNA
gcaagttcaaaagcaaaggt

SEQ ID NO: 156290 - DNA, 20 bp, synthetic construct
  source 1..20: mol_type = other DNA
agcaagttcaaaagcaaagg

SEQ ID NO: 156291 - DNA, 20 bp, synthetic construct
  source 1..20: mol_type = other DNA
cagcaagttcaaaagcaaag

SEQ ID NO: 156292 - DNA, 20 bp, synthetic construct
  source 1..20: mol_type = other DNA
tcagcaagttcaaaagcaaa

SEQ ID NO: 156293 - DNA, 20 bp, synthetic construct
  source 1..20: mol_type = other DNA
gtcagcaagttcaaaagcaa

SEQ ID NO: 156294 - DNA, 20 bp, synthetic construct
  source 1..20: mol_type = other DNA
agtcagcaagttcaaaagca

SEQ ID NO: 156295 - DNA, 20 bp, synthetic construct
  source 1..20: mol_type = other DNA
gagtcagcaagttcaaaagc

SEQ ID NO: 156296 - DNA, 20 bp, synthetic construct
  source 1..20: mol_type = other DNA
tgagtcagcaagttcaaaag

SEQ ID NO: 156297 - DNA, 20 bp, synthetic construct
  source 1..20: mol_type = other DNA
atgagtcagcaagttcaaaa

SEQ ID NO: 156298 - DNA, 20 bp, synthetic construct
  source 1..20: mol_type = other DNA
gatgagtcagcaagttcaaa

SEQ ID NO: 156299 - DNA, 20 bp, synthetic construct
  source 1..20: mol_type = other DNA
agatgagtcagcaagttcaa

SEQ ID NO: 156300 - DNA, 20 bp, synthetic construct
  source 1..20: mol_type = other DNA
tagatgagtcagcaagttca

SEQ ID NO: 156301 - DNA, 20 bp, synthetic construct
  source 1..20: mol_type = other DNA
ttagatgagtcagcaagttc

SEQ ID NO: 156302 - DNA, 20 bp, synthetic construct
  source 1..20: mol_type = other DNA
tttagatgagtcagcaagtt

SEQ ID NO: 156303 - DNA, 20 bp, synthetic construct
  source 1..20: mol_type = other DNA
gtttagatgagtcagcaagt

SEQ ID NO: 156304 - DNA, 20 bp, synthetic construct
  source 1..20: mol_type = other DNA
ggtttagatgagtcagcaag

SEQ ID NO: 156305 - DNA, 20 bp, synthetic construct
  source 1..20: mol_type = other DNA
gggtttagatgagtcagcaa

SEQ ID NO: 156306 - DNA, 20 bp, synthetic construct
  source 1..20: mol_type = other DNA
ggggtttagatgagtcagca

SEQ ID NO: 156307 - DNA, 20 bp, synthetic construct
  source 1..20: mol_type = other DNA
aggggtttagatgagtcagc

SEQ ID NO: 156308 - DNA, 20 bp, synthetic construct
  source 1..20: mol_type = other DNA
caggggtttagatgagtcag

SEQ ID NO: 156309 - DNA, 20 bp, synthetic construct
  source 1..20: mol_type = other DNA
gcaggggtttagatgagtca

SEQ ID NO: 156310 - DNA, 20 bp, synthetic construct
  source 1..20: mol_type = other DNA
agcaggggtttagatgagtc

SEQ ID NO: 156311 - DNA, 20 bp, synthetic construct
  source 1..20: mol_type = other DNA
gagcaggggtttagatgagt

SEQ ID NO: 156312 - DNA, 20 bp, synthetic construct
  source 1..20: mol_type = other DNA
ggagcaggggtttagatgag

SEQ ID NO: 156313 - DNA, 20 bp, synthetic construct
  source 1..20: mol_type = other DNA
gggagcaggggtttagatga

SEQ ID NO: 156314 - DNA, 20 bp, synthetic construct
  source 1..20: mol_type = other DNA
tgggagcaggggtttagatg

SEQ ID NO: 156315 - DNA, 20 bp, synthetic construct
  source 1..20: mol_type = other DNA
ttgggagcaggggtttagat

SEQ ID NO: 156316 - DNA, 20 bp, synthetic construct
  source 1..20: mol_type = other DNA
tttgggagcaggggtttaga

SEQ ID NO: 156317 - DNA, 20 bp, synthetic construct
  source 1..20: mol_type = other DNA
atttgggagcaggggtttag

SEQ ID NO: 156318 - DNA, 20 bp, synthetic construct
  source 1..20: mol_type = other DNA
catttgggagcaggggttta

SEQ ID NO: 156319 - DNA, 20 bp, synthetic construct
  source 1..20: mol_type = other DNA
gcatttgggagcaggggttt

SEQ ID NO: 156320 - DNA, 20 bp, synthetic construct
  source 1..20: mol_type = other DNA
agcatttgggagcaggggtt

SEQ ID NO: 156321 - DNA, 20 bp, synthetic construct
  source 1..20: mol_type = other DNA
cagcatttgggagcaggggt

SEQ ID NO: 156322 - DNA, 20 bp, synthetic construct
  source 1..20: mol_type = other DNA
ccagcatttgggagcagggg

SEQ ID NO: 156323 - DNA, 20 bp, synthetic construct
  source 1..20: mol_type = other DNA
tccagcatttgggagcaggg

SEQ ID NO: 156324 - DNA, 20 bp, synthetic construct
  source 1..20: mol_type = other DNA
ttccagcatttgggagcagg

SEQ ID NO: 156325 - DNA, 20 bp, synthetic construct
  source 1..20: mol_type = other DNA
attccagcatttgggagcag

SEQ ID NO: 156326 - DNA, 20 bp, synthetic construct
  source 1..20: mol_type = other DNA
cattccagcatttgggagca

SEQ ID NO: 156327 - DNA, 20 bp, synthetic construct
  source 1..20: mol_type = other DNA
gcattccagcatttgggagc

SEQ ID NO: 156328 - DNA, 20 bp, synthetic construct
  source 1..20: mol_type = other DNA
agcattccagcatttgggag

SEQ ID NO: 156329 - DNA, 20 bp, synthetic construct
  source 1..20: mol_type = other DNA
aagcattccagcatttggga

SEQ ID NO: 156330 - DNA, 20 bp, synthetic construct
  source 1..20: mol_type = other DNA
aaagcattccagcatttggg

SEQ ID NO: 156331 - DNA, 20 bp, synthetic construct
  source 1..20: mol_type = other DNA
aaaagcattccagcatttgg

SEQ ID NO: 156332 - DNA, 20 bp, synthetic construct
  source 1..20: mol_type = other DNA
taaaagcattccagcatttg

SEQ ID NO: 156333 - DNA, 20 bp, synthetic construct
  source 1..20: mol_type = other DNA
gtaaaagcattccagcattt

SEQ ID NO: 156334 - DNA, 20 bp, synthetic construct
  source 1..20: mol_type = other DNA
agtaaaagcattccagcatt

SEQ ID NO: 156335 - DNA, 20 bp, synthetic construct
  source 1..20: mol_type = other DNA
aagtaaaagcattccagcat

SEQ ID NO: 156336 - DNA, 20 bp, synthetic construct
  source 1..20: mol_type = other DNA
gaagtaaaagcattccagca

SEQ ID NO: 156337 - DNA, 20 bp, synthetic construct
  source 1..20: mol_type = other DNA
ggaagtaaaagcattccagc

SEQ ID NO: 156338 - DNA, 20 bp, synthetic construct
  source 1..20: mol_type = other DNA
aggaagtaaaagcattccag

SEQ ID NO: 156339 - DNA, 20 bp, synthetic construct
  source 1..20: mol_type = other DNA
caggaagtaaaagcattcca

SEQ ID NO: 156340 - DNA, 20 bp, synthetic construct
  source 1..20: mol_type = other DNA
ccaggaagtaaaagcattcc

SEQ ID NO: 156341 - DNA, 20 bp, synthetic construct
  source 1..20: mol_type = other DNA
cccaggaagtaaaagcattc

SEQ ID NO: 156342 - DNA, 20 bp, synthetic construct
  source 1..20: mol_type = other DNA
gcccaggaagtaaaagcatt

SEQ ID NO: 156343 - DNA, 20 bp, synthetic construct
  source 1..20: mol_type = other DNA
agcccaggaagtaaaagcat

SEQ ID NO: 156344 - DNA, 20 bp, synthetic construct
  source 1..20: mol_type = other DNA
aagcccaggaagtaaaagca

SEQ ID NO: 156345 - DNA, 20 bp, synthetic construct
  source 1..20: mol_type = other DNA
taagcccaggaagtaaaagc

SEQ ID NO: 156346 - DNA, 20 bp, synthetic construct
  source 1..20: mol_type = other DNA
ttaagcccaggaagtaaaag

SEQ ID NO: 156347 - DNA, 20 bp, synthetic construct
  source 1..20: mol_type = other DNA
tttaagcccaggaagtaaaa

SEQ ID NO: 156348 - DNA, 20 bp, synthetic construct
  source 1..20: mol_type = other DNA
ctttaagcccaggaagtaaa

SEQ ID NO: 156349 - DNA, 20 bp, synthetic construct
  source 1..20: mol_type = other DNA
cctttaagcccaggaagtaa

SEQ ID NO: 156350 - DNA, 20 bp, synthetic construct
  source 1..20: mol_type = other DNA
tcctttaagcccaggaagta

SEQ ID NO: 156351 - DNA, 20 bp, synthetic construct
  source 1..20: mol_type = other DNA
ttcctttaagcccaggaagt

SEQ ID NO: 156352 - DNA, 20 bp, synthetic construct
  source 1..20: mol_type = other DNA
attcctttaagcccaggaag

SEQ ID NO: 156353 - DNA, 20 bp, synthetic construct
  source 1..20: mol_type = other DNA
aattcctttaagcccaggaa

SEQ ID NO: 156354 - DNA, 20 bp, synthetic construct
  source 1..20: mol_type = other DNA
caattcctttaagcccagga

SEQ ID NO: 156355 - DNA, 20 bp, synthetic construct
  source 1..20: mol_type = other DNA
tcaattcctttaagcccagg

SEQ ID NO: 156356 - DNA, 20 bp, synthetic construct
  source 1..20: mol_type = other DNA
gtcaattcctttaagcccag

SEQ ID NO: 156357 - DNA, 20 bp, synthetic construct
  source 1..20: mol_type = other DNA
tgtcaattcctttaagccca

SEQ ID NO: 156358 - DNA, 20 bp, synthetic construct
  source 1..20: mol_type = other DNA
ttgtcaattcctttaagccc

SEQ ID NO: 156359 - DNA, 20 bp, synthetic construct
  source 1..20: mol_type = other DNA
tttgtcaattcctttaagcc

SEQ ID NO: 156360 - DNA, 20 bp, synthetic construct
  source 1..20: mol_type = other DNA
atttgtcaattcctttaagc

SEQ ID NO: 156361 - DNA, 20 bp, synthetic construct
  source 1..20: mol_type = other DNA
catttgtcaattcctttaag

SEQ ID NO: 156362 - DNA, 20 bp, synthetic construct
  source 1..20: mol_type = other DNA
ccatttgtcaattcctttaa

SEQ ID NO: 156363 - DNA, 20 bp, synthetic construct
  source 1..20: mol_type = other DNA
cccatttgtcaattccttta

SEQ ID NO: 156364 - DNA, 20 bp, synthetic construct
  source 1..20: mol_type = other DNA
ccccatttgtcaattccttt

SEQ ID NO: 156365 - DNA, 20 bp, synthetic construct
  source 1..20: mol_type = other DNA
tccccatttgtcaattcctt

SEQ ID NO: 156366 - DNA, 20 bp, synthetic construct
  source 1..20: mol_type = other DNA
gtccccatttgtcaattcct

SEQ ID NO: 156367 - DNA, 20 bp, synthetic construct
  source 1..20: mol_type = other DNA
tgtccccatttgtcaattcc

SEQ ID NO: 156368 - DNA, 20 bp, synthetic construct
  source 1..20: mol_type = other DNA
gtgtccccatttgtcaattc

SEQ ID NO: 156369 - DNA, 20 bp, synthetic construct
  source 1..20: mol_type = other DNA
agtgtccccatttgtcaatt

SEQ ID NO: 156370 - DNA, 20 bp, synthetic construct
  source 1..20: mol_type = other DNA
aagtgtccccatttgtcaat

SEQ ID NO: 156371 - DNA, 20 bp, synthetic construct
  source 1..20: mol_type = other DNA
taagtgtccccatttgtcaa

SEQ ID NO: 156372 - DNA, 20 bp, synthetic construct
  source 1..20: mol_type = other DNA
ttaagtgtccccatttgtca

SEQ ID NO: 156373 - DNA, 20 bp, synthetic construct
  source 1..20: mol_type = other DNA
tttaagtgtccccatttgtc

SEQ ID NO: 156374 - DNA, 20 bp, synthetic construct
  source 1..20: mol_type = other DNA
ttttaagtgtccccatttgt

SEQ ID NO: 156375 - DNA, 20 bp, synthetic construct
  source 1..20: mol_type = other DNA
gttttaagtgtccccatttg

SEQ ID NO: 156376 - DNA, 20 bp, synthetic construct
  source 1..20: mol_type = other DNA
cgttttaagtgtccccattt

SEQ ID NO: 156377 - DNA, 20 bp, synthetic construct
  source 1..20: mol_type = other DNA
tcgttttaagtgtccccatt

SEQ ID NO: 156378 - DNA, 20 bp, synthetic construct
  source 1..20: mol_type = other DNA
atcgttttaagtgtccccat

SEQ ID NO: 156379 - DNA, 20 bp, synthetic construct
  source 1..20: mol_type = other DNA
aatcgttttaagtgtcccca

SEQ ID NO: 156380 - DNA, 20 bp, synthetic construct
  source 1..20: mol_type = other DNA
aaatcgttttaagtgtcccc

SEQ ID NO: 156381 - DNA, 20 bp, synthetic construct
  source 1..20: mol_type = other DNA
caaatcgttttaagtgtccc

SEQ ID NO: 156382 - DNA, 20 bp, synthetic construct
  source 1..20: mol_type = other DNA
ccaaatcgttttaagtgtcc

SEQ ID NO: 156383 - DNA, 20 bp, synthetic construct
  source 1..20: mol_type = other DNA
accaaatcgttttaagtgtc

SEQ ID NO: 156384 - DNA, 20 bp, synthetic construct
  source 1..20: mol_type = other DNA
aaccaaatcgttttaagtgt

SEQ ID NO: 156385 - DNA, 20 bp, synthetic construct
  source 1..20: mol_type = other DNA
aaaccaaatcgttttaagtg

SEQ ID NO: 156386 - DNA, 20 bp, synthetic construct
  source 1..20: mol_type = other DNA
aaaaccaaatcgttttaagt

SEQ ID NO: 156387 - DNA, 20 bp, synthetic construct
  source 1..20: mol_type = other DNA
caaaaccaaatcgttttaag

SEQ ID NO: 156388 - DNA, 20 bp, synthetic construct
  source 1..20: mol_type = other DNA
acaaaaccaaatcgttttaa

SEQ ID NO: 156389 - DNA, 20 bp, synthetic construct
  source 1..20: mol_type = other DNA
tacaaaaccaaatcgtttta

SEQ ID NO: 156390 - DNA, 20 bp, synthetic construct
  source 1..20: mol_type = other DNA
ctacaaaaccaaatcgtttt

SEQ ID NO: 156391 - DNA, 20 bp, synthetic construct
  source 1..20: mol_type = other DNA
gctacaaaaccaaatcgttt

SEQ ID NO: 156392 - DNA, 20 bp, synthetic construct
  source 1..20: mol_type = other DNA
tgctacaaaaccaaatcgtt

SEQ ID NO: 156393 - DNA, 20 bp, synthetic construct
  source 1..20: mol_type = other DNA
atgctacaaaaccaaatcgt

SEQ ID NO: 156394 - DNA, 20 bp, synthetic construct
  source 1..20: mol_type = other DNA
aatgctacaaaaccaaatcg

SEQ ID NO: 156395 - DNA, 20 bp, synthetic construct
  source 1..20: mol_type = other DNA
aaatgctacaaaaccaaatc

SEQ ID NO: 156396 - DNA, 20 bp, synthetic construct
  source 1..20: mol_type = other DNA
taaatgctacaaaaccaaat

SEQ ID NO: 156397 - DNA, 20 bp, synthetic construct
  source 1..20: mol_type = other DNA
ataaatgctacaaaaccaaa

SEQ ID NO: 156398 - DNA, 20 bp, synthetic construct
  source 1..20: mol_type = other DNA
aataaatgctacaaaaccaa

SEQ ID NO: 156399 - DNA, 20 bp, synthetic construct
  source 1..20: mol_type = other DNA
caataaatgctacaaaacca

SEQ ID NO: 156400 - DNA, 20 bp, synthetic construct
  source 1..20: mol_type = other DNA
tcaataaatgctacaaaacc

SEQ ID NO: 156401 - DNA, 20 bp, synthetic construct
  source 1..20: mol_type = other DNA
ttcaataaatgctacaaaac

SEQ ID NO: 156402 - DNA, 20 bp, synthetic construct
  source 1..20: mol_type = other DNA
attcaataaatgctacaaaa

SEQ ID NO: 156403 - DNA, 20 bp, synthetic construct
  source 1..20: mol_type = other DNA
tattcaataaatgctacaaa

SEQ ID NO: 156404 - DNA, 20 bp, synthetic construct
  source 1..20: mol_type = other DNA
atattcaataaatgctacaa

SEQ ID NO: 156405 - DNA, 20 bp, synthetic construct
  source 1..20: mol_type = other DNA
tatattcaataaatgctaca

SEQ ID NO: 156406 - DNA, 20 bp, synthetic construct
  source 1..20: mol_type = other DNA
ctatattcaataaatgctac

SEQ ID NO: 156407 - DNA, 20 bp, synthetic construct
  source 1..20: mol_type = other DNA
tctatattcaataaatgcta

SEQ ID NO: 156408 - DNA, 20 bp, synthetic construct
  source 1..20: mol_type = other DNA
ttctatattcaataaatgct

SEQ ID NO: 156409 - DNA, 20 bp, synthetic construct
  source 1..20: mol_type = other DNA
gttctatattcaataaatgc

SEQ ID NO: 156410 - DNA, 20 bp, synthetic construct
  source 1..20: mol_type = other DNA
agttctatattcaataaatg

SEQ ID NO: 156411 - DNA, 20 bp, synthetic construct
  source 1..20: mol_type = other DNA
tagttctatattcaataaat

SEQ ID NO: 156412 - DNA, 20 bp, synthetic construct
  source 1..20: mol_type = other DNA
ttagttctatattcaataaa

SEQ ID NO: 156413 - DNA, 20 bp, synthetic construct
  source 1..20: mol_type = other DNA
attagttctatattcaataa

SEQ ID NO: 156414 - DNA, 20 bp, synthetic construct
  source 1..20: mol_type = other DNA
tattagttctatattcaata

SEQ ID NO: 156415 - DNA, 20 bp, synthetic construct
  source 1..20: mol_type = other DNA
gtattagttctatattcaat

SEQ ID NO: 156416 - DNA, 20 bp, synthetic construct
  source 1..20: mol_type = other DNA
tgtattagttctatattcaa

SEQ ID NO: 156417 - DNA, 20 bp, synthetic construct
  source 1..20: mol_type = other DNA
ttgtattagttctatattca

SEQ ID NO: 156418 - DNA, 20 bp, synthetic construct
  source 1..20: mol_type = other DNA
cttgtattagttctatattc

SEQ ID NO: 156419 - DNA, 20 bp, synthetic construct
  source 1..20: mol_type = other DNA
acttgtattagttctatatt

SEQ ID NO: 156420 - DNA, 20 bp, synthetic construct
  source 1..20: mol_type = other DNA
cacttgtattagttctatat

SEQ ID NO: 156421 - DNA, 20 bp, synthetic construct
  source 1..20: mol_type = other DNA
gcacttgtattagttctata

SEQ ID NO: 156422 - DNA, 20 bp, synthetic construct
  source 1..20: mol_type = other DNA
ggcacttgtattagttctat

SEQ ID NO: 156423 - DNA, 20 bp, synthetic construct
  source 1..20: mol_type = other DNA
tggcacttgtattagttcta

SEQ ID NO: 156424 - DNA, 20 bp, synthetic construct
  source 1..20: mol_type = other DNA
ttggcacttgtattagttct

SEQ ID NO: 156425 - DNA, 20 bp, synthetic construct
  source 1..20: mol_type = other DNA
tttggcacttgtattagttc

SEQ ID NO: 156426 - DNA, 20 bp, synthetic construct
  source 1..20: mol_type = other DNA
ctttggcacttgtattagtt

SEQ ID NO: 156427 - DNA, 20 bp, synthetic construct
  source 1..20: mol_type = other DNA
cctttggcacttgtattagt

SEQ ID NO: 156428 - DNA, 20 bp, synthetic construct
  source 1..20: mol_type = other DNA
ccctttggcacttgtattag

SEQ ID NO: 156429 - DNA, 20 bp, synthetic construct
  source 1..20: mol_type = other DNA
cccctttggcacttgtatta

SEQ ID NO: 156430 - DNA, 20 bp, synthetic construct
  source 1..20: mol_type = other DNA
tcccctttggcacttgtatt

SEQ ID NO: 156431 - DNA, 20 bp, synthetic construct
  source 1..20: mol_type = other DNA
ttcccctttggcacttgtat

SEQ ID NO: 156432 - DNA, 20 bp, synthetic construct
  source 1..20: mol_type = other DNA
gttcccctttggcacttgta

SEQ ID NO: 156433 - DNA, 20 bp, synthetic construct
  source 1..20: mol_type = other DNA
agttcccctttggcacttgt

SEQ ID NO: 156434 - DNA, 20 bp, synthetic construct
  source 1..20: mol_type = other DNA
tagttcccctttggcacttg

SEQ ID NO: 156435 - DNA, 20 bp, synthetic construct
  source 1..20: mol_type = other DNA
ttagttcccctttggcactt

SEQ ID NO: 156436 - DNA, 20 bp, synthetic construct
  source 1..20: mol_type = other DNA
attagttcccctttggcact

SEQ ID NO: 156437 - DNA, 20 bp, synthetic construct
  source 1..20: mol_type = other DNA
tattagttcccctttggcac

SEQ ID NO: 156438 - DNA, 20 bp, synthetic construct
  source 1..20: mol_type = other DNA
gtattagttcccctttggca

SEQ ID NO: 156439 - DNA, 20 bp, synthetic construct
  source 1..20: mol_type = other DNA
tgtattagttcccctttggc

SEQ ID NO: 156440 - DNA, 20 bp, synthetic construct
  source 1..20: mol_type = other DNA
ctgtattagttcccctttgg

SEQ ID NO: 156441 - DNA, 20 bp, synthetic construct
  source 1..20: mol_type = other DNA
cctgtattagttcccctttg

SEQ ID NO: 156442 - DNA, 20 bp, synthetic construct
  source 1..20: mol_type = other DNA
tcctgtattagttccccttt

SEQ ID NO: 156443 - DNA, 20 bp, synthetic construct
  source 1..20: mol_type = other DNA
ttcctgtattagttcccctt

SEQ ID NO: 156444 - DNA, 20 bp, synthetic construct
  source 1..20: mol_type = other DNA
tttcctgtattagttcccct

SEQ ID NO: 156445 - DNA, 20 bp, synthetic construct
  source 1..20: mol_type = other DNA
atttcctgtattagttcccc

SEQ ID NO: 156446 - DNA, 20 bp, synthetic construct
  source 1..20: mol_type = other DNA
catttcctgtattagttccc

SEQ ID NO: 156447 - DNA, 20 bp, synthetic construct
  source 1..20: mol_type = other DNA
acatttcctgtattagttcc

SEQ ID NO: 156448 - DNA, 20 bp, synthetic construct
  source 1..20: mol_type = other DNA
gacatttcctgtattagttc

SEQ ID NO: 156449 - DNA, 20 bp, synthetic construct
  source 1..20: mol_type = other DNA
tgacatttcctgtattagtt

SEQ ID NO: 156450 - DNA, 20 bp, synthetic construct
  source 1..20: mol_type = other DNA
atgacatttcctgtattagt

SEQ ID NO: 156451 - DNA, 20 bp, synthetic construct
  source 1..20: mol_type = other DNA
catgacatttcctgtattag

SEQ ID NO: 156452 - DNA, 20 bp, synthetic construct
  source 1..20: mol_type = other DNA
tcatgacatttcctgtatta

SEQ ID NO: 156453 - DNA, 20 bp, synthetic construct
  source 1..20: mol_type = other DNA
ttcatgacatttcctgtatt

SEQ ID NO: 156454 - DNA, 20 bp, synthetic construct
  source 1..20: mol_type = other DNA
gttcatgacatttcctgtat

SEQ ID NO: 156455 - DNA, 20 bp, synthetic construct
  source 1..20: mol_type = other DNA
tgttcatgacatttcctgta

SEQ ID NO: 156456 - DNA, 20 bp, synthetic construct
  source 1..20: mol_type = other DNA
ctgttcatgacatttcctgt

SEQ ID NO: 156457 - DNA, 20 bp, synthetic construct
  source 1..20: mol_type = other DNA
actgttcatgacatttcctg

SEQ ID NO: 156458 - DNA, 20 bp, synthetic construct
  source 1..20: mol_type = other DNA
tactgttcatgacatttcct

SEQ ID NO: 156459 - DNA, 20 bp, synthetic construct
  source 1..20: mol_type = other DNA
gtactgttcatgacatttcc

SEQ ID NO: 156460 - DNA, 20 bp, synthetic construct
  source 1..20: mol_type = other DNA
agtactgttcatgacatttc

SEQ ID NO: 156461 - DNA, 20 bp, synthetic construct
  source 1..20: mol_type = other DNA
cagtactgttcatgacattt

SEQ ID NO: 156462 - DNA, 20 bp, synthetic construct
  source 1..20: mol_type = other DNA
acagtactgttcatgacatt

SEQ ID NO: 156463 - DNA, 20 bp, synthetic construct
  source 1..20: mol_type = other DNA
gacagtactgttcatgacat

SEQ ID NO: 156464 - DNA, 20 bp, synthetic construct
  source 1..20: mol_type = other DNA
tgacagtactgttcatgaca

SEQ ID NO: 156465 - DNA, 20 bp, synthetic construct
  source 1..20: mol_type = other DNA
ttgacagtactgttcatgac

SEQ ID NO: 156466 - DNA, 20 bp, synthetic construct
  source 1..20: mol_type = other DNA
gttgacagtactgttcatga

SEQ ID NO: 156467 - DNA, 20 bp, synthetic construct
  source 1..20: mol_type = other DNA
ggttgacagtactgttcatg

SEQ ID NO: 156468 - DNA, 20 bp, synthetic construct
  source 1..20: mol_type = other DNA
tggttgacagtactgttcat

SEQ ID NO: 156469 - DNA, 20 bp, synthetic construct
  source 1..20: mol_type = other DNA
gtggttgacagtactgttca

SEQ ID NO: 156470 - DNA, 20 bp, synthetic construct
  source 1..20: mol_type = other DNA
agtggttgacagtactgttc

SEQ ID NO: 156471 - DNA, 20 bp, synthetic construct
  source 1..20: mol_type = other DNA
tagtggttgacagtactgtt

SEQ ID NO: 156472 - DNA, 20 bp, synthetic construct
  source 1..20: mol_type = other DNA
ctagtggttgacagtactgt

SEQ ID NO: 156473 - DNA, 20 bp, synthetic construct
  source 1..20: mol_type = other DNA
gctagtggttgacagtactg

SEQ ID NO: 156474 - DNA, 20 bp, synthetic construct
  source 1..20: mol_type = other DNA
tgctagtggttgacagtact

SEQ ID NO: 156475 - DNA, 20 bp, synthetic construct
  source 1..20: mol_type = other DNA
ttgctagtggttgacagtac

SEQ ID NO: 156476 - DNA, 20 bp, synthetic construct
  source 1..20: mol_type = other DNA
tttgctagtggttgacagta

SEQ ID NO: 156477 - DNA, 20 bp, synthetic construct
  source 1..20: mol_type = other DNA
ttttgctagtggttgacagt

SEQ ID NO: 156478 - DNA, 20 bp, synthetic construct
  source 1..20: mol_type = other DNA
attttgctagtggttgacag

SEQ ID NO: 156479 - DNA, 20 bp, synthetic construct
  source 1..20: mol_type = other DNA
gattttgctagtggttgaca

SEQ ID NO: 156480 - DNA, 20 bp, synthetic construct
  source 1..20: mol_type = other DNA
tgattttgctagtggttgac

SEQ ID NO: 156481 - DNA, 20 bp, synthetic construct
  source 1..20: mol_type = other DNA
ttgattttgctagtggttga

SEQ ID NO: 156482 - DNA, 20 bp, synthetic construct
  source 1..20: mol_type = other DNA
attgattttgctagtggttg

SEQ ID NO: 156483 - DNA, 20 bp, synthetic construct
  source 1..20: mol_type = other DNA
gattgattttgctagtggtt

SEQ ID NO: 156484 - DNA, 20 bp, synthetic construct
  source 1..20: mol_type = other DNA
tgattgattttgctagtggt

SEQ ID NO: 156485 - DNA, 20 bp, synthetic construct
  source 1..20: mol_type = other DNA
atgattgattttgctagtgg

SEQ ID NO: 156486 - DNA, 20 bp, synthetic construct
  source 1..20: mol_type = other DNA
gatgattgattttgctagtg

SEQ ID NO: 156487 - DNA, 20 bp, synthetic construct
  source 1..20: mol_type = other DNA
tgatgattgattttgctagt

SEQ ID NO: 156488 - DNA, 20 bp, synthetic construct
  source 1..20: mol_type = other DNA
atgatgattgattttgctag

SEQ ID NO: 156489 - DNA, 20 bp, synthetic construct
  source 1..20: mol_type = other DNA
aatgatgattgattttgcta

SEQ ID NO: 156490 - DNA, 20 bp, synthetic construct
  source 1..20: mol_type = other DNA
caatgatgattgattttgct

SEQ ID NO: 156491 - DNA, 20 bp, synthetic construct
  source 1..20: mol_type = other DNA
acaatgatgattgattttgc

SEQ ID NO: 156492 - DNA, 20 bp, synthetic construct
  source 1..20: mol_type = other DNA
cacaatgatgattgattttg

SEQ ID NO: 156493 - DNA, 20 bp, synthetic construct
  source 1..20: mol_type = other DNA
tcacaatgatgattgatttt

SEQ ID NO: 156494 - DNA, 20 bp, synthetic construct
  source 1..20: mol_type = other DNA
ttcacaatgatgattgattt

SEQ ID NO: 156495 - DNA, 20 bp, synthetic construct
  source 1..20: mol_type = other DNA
tttcacaatgatgattgatt

SEQ ID NO: 156496 - DNA, 20 bp, synthetic construct
  source 1..20: mol_type = other DNA
gtttcacaatgatgattgat

SEQ ID NO: 156497 - DNA, 20 bp, synthetic construct
  source 1..20: mol_type = other DNA
tgtttcacaatgatgattga

SEQ ID NO: 156498 - DNA, 20 bp, synthetic construct
  source 1..20: mol_type = other DNA
atgtttcacaatgatgattg

SEQ ID NO: 156499 - DNA, 20 bp, synthetic construct
  source 1..20: mol_type = other DNA
tatgtttcacaatgatgatt

SEQ ID NO: 156500 - DNA, 20 bp, synthetic construct
  source 1..20: mol_type = other DNA
ctatgtttcacaatgatgat

SEQ ID NO: 156501 - DNA, 20 bp, synthetic construct
  source 1..20: mol_type = other DNA
cctatgtttcacaatgatga

SEQ ID NO: 156502 - DNA, 20 bp, synthetic construct
  source 1..20: mol_type = other DNA
tcctatgtttcacaatgatg

SEQ ID NO: 156503 - DNA, 20 bp, synthetic construct
  source 1..20: mol_type = other DNA
ttcctatgtttcacaatgat

SEQ ID NO: 156504 - DNA, 20 bp, synthetic construct
  source 1..20: mol_type = other DNA
cttcctatgtttcacaatga

SEQ ID NO: 156505 - DNA, 20 bp, synthetic construct
  source 1..20: mol_type = other DNA
gcttcctatgtttcacaatg

SEQ ID NO: 156506 - DNA, 20 bp, synthetic construct
  source 1..20: mol_type = other DNA
agcttcctatgtttcacaat

SEQ ID NO: 156507 - DNA, 20 bp, synthetic construct
  source 1..20: mol_type = other DNA
aagcttcctatgtttcacaa

SEQ ID NO: 156508 - DNA, 20 bp, synthetic construct
  source 1..20: mol_type = other DNA
gaagcttcctatgtttcaca

SEQ ID NO: 156509 - DNA, 20 bp, synthetic construct
  source 1..20: mol_type = other DNA
agaagcttcctatgtttcac

SEQ ID NO: 156510 - DNA, 20 bp, synthetic construct
  source 1..20: mol_type = other DNA
cagaagcttcctatgtttca

SEQ ID NO: 156511 - DNA, 20 bp, synthetic construct
  source 1..20: mol_type = other DNA
acagaagcttcctatgtttc

SEQ ID NO: 156512 - DNA, 20 bp, synthetic construct
  source 1..20: mol_type = other DNA
tacagaagcttcctatgttt

SEQ ID NO: 156513 - DNA, 20 bp, synthetic construct
  source 1..20: mol_type = other DNA
ctacagaagcttcctatgtt

SEQ ID NO: 156514 - DNA, 20 bp, synthetic construct
  source 1..20: mol_type = other DNA
tctacagaagcttcctatgt

SEQ ID NO: 156515 - DNA, 20 bp, synthetic construct
  source 1..20: mol_type = other DNA
atctacagaagcttcctatg

SEQ ID NO: 156516 - DNA, 20 bp, synthetic construct
  source 1..20: mol_type = other DNA
tatctacagaagcttcctat

SEQ ID NO: 156517 - DNA, 20 bp, synthetic construct
  source 1..20: mol_type = other DNA
ttatctacagaagcttccta

SEQ ID NO: 156518 - DNA, 20 bp, synthetic construct
  source 1..20: mol_type = other DNA
tttatctacagaagcttcct

SEQ ID NO: 156519 - DNA, 20 bp, synthetic construct
  source 1..20: mol_type = other DNA
ttttatctacagaagcttcc

SEQ ID NO: 156520 - DNA, 20 bp, synthetic construct
  source 1..20: mol_type = other DNA
tttttatctacagaagcttc

SEQ ID NO: 156521 - DNA, 20 bp, synthetic construct
  source 1..20: mol_type = other DNA
ttttttatctacagaagctt

SEQ ID NO: 156522 - DNA, 20 bp, synthetic construct
  source 1..20: mol_type = other DNA
tttttttatctacagaagct

SEQ ID NO: 156523 - DNA, 20 bp, synthetic construct
  source 1..20: mol_type = other DNA
ttttttttatctacagaagc

SEQ ID NO: 156524 - DNA, 20 bp, synthetic construct
  source 1..20: mol_type = other DNA
tttttttttatctacagaag

SEQ ID NO: 156525 - DNA, 20 bp, synthetic construct
  source 1..20: mol_type = other DNA
ttttttttttatctacagaa

SEQ ID NO: 156526 - DNA, 20 bp, synthetic construct
  source 1..20: mol_type = other DNA
tttttttttttatctacaga

SEQ ID NO: 156527 - DNA, 20 bp, synthetic construct
  source 1..20: mol_type = other DNA
atttttttttttatctacag

SEQ ID NO: 156528 - DNA, 20 bp, synthetic construct
  source 1..20: mol_type = other DNA
aatttttttttttatctaca

SEQ ID NO: 156529 - DNA, 20 bp, synthetic construct
  source 1..20: mol_type = other DNA
caatttttttttttatctac

SEQ ID NO: 156530 - DNA, 20 bp, synthetic construct
  source 1..20: mol_type = other DNA
tcaatttttttttttatcta

SEQ ID NO: 156531 - DNA, 20 bp, synthetic construct
  source 1..20: mol_type = other DNA
atcaatttttttttttatct

SEQ ID NO: 156532 - DNA, 20 bp, synthetic construct
  source 1..20: mol_type = other DNA
tatcaatttttttttttatc

SEQ ID NO: 156533 - DNA, 20 bp, synthetic construct
  source 1..20: mol_type = other DNA
gtatcaatttttttttttat

SEQ ID NO: 156534 - DNA, 20 bp, synthetic construct
  source 1..20: mol_type = other DNA
agtatcaattttttttttta

SEQ ID NO: 156535 - DNA, 20 bp, synthetic construct
  source 1..20: mol_type = other DNA
cagtatcaattttttttttt

SEQ ID NO: 156536 - DNA, 20 bp, synthetic construct
  source 1..20: mol_type = other DNA
tcagtatcaatttttttttt

SEQ ID NO: 156537 - DNA, 20 bp, synthetic construct
  source 1..20: mol_type = other DNA
ttcagtatcaattttttttt

SEQ ID NO: 156538 - DNA, 20 bp, synthetic construct
  source 1..20: mol_type = other DNA
tttcagtatcaatttttttt

SEQ ID NO: 156539 - DNA, 20 bp, synthetic construct
  source 1..20: mol_type = other DNA
ttttcagtatcaattttttt

SEQ ID NO: 156540 - DNA, 20 bp, synthetic construct
  source 1..20: mol_type = other DNA
gttttcagtatcaatttttt

SEQ ID NO: 156541 - DNA, 20 bp, synthetic construct
  source 1..20: mol_type = other DNA
agttttcagtatcaattttt

SEQ ID NO: 156542 - DNA, 20 bp, synthetic construct
  source 1..20: mol_type = other DNA
tagttttcagtatcaatttt

SEQ ID NO: 156543 - DNA, 20 bp, synthetic construct
  source 1..20: mol_type = other DNA
ctagttttcagtatcaattt

SEQ ID NO: 156544 - DNA, 20 bp, synthetic construct
  source 1..20: mol_type = other DNA
actagttttcagtatcaatt

SEQ ID NO: 156545 - DNA, 20 bp, synthetic construct
  source 1..20: mol_type = other DNA
gactagttttcagtatcaat

SEQ ID NO: 156546 - DNA, 20 bp, synthetic construct
  source 1..20: mol_type = other DNA
cgactagttttcagtatcaa

SEQ ID NO: 156547 - DNA, 20 bp, synthetic construct
  source 1..20: mol_type = other DNA
tcgactagttttcagtatca

SEQ ID NO: 156548 - DNA, 20 bp, synthetic construct
  source 1..20: mol_type = other DNA
ctcgactagttttcagtatc

SEQ ID NO: 156549 - DNA, 20 bp, synthetic construct
  source 1..20: mol_type = other DNA
tctcgactagttttcagtat

SEQ ID NO: 156550 - DNA, 20 bp, synthetic construct
  source 1..20: mol_type = other DNA
gtctcgactagttttcagta

SEQ ID NO: 156551 - DNA, 20 bp, synthetic construct
  source 1..20: mol_type = other DNA
agtctcgactagttttcagt

SEQ ID NO: 156552 - DNA, 20 bp, synthetic construct
  source 1..20: mol_type = other DNA
gagtctcgactagttttcag

SEQ ID NO: 156553 - DNA, 20 bp, synthetic construct
  source 1..20: mol_type = other DNA
ggagtctcgactagttttca

SEQ ID NO: 156554 - DNA, 20 bp, synthetic construct
  source 1..20: mol_type = other DNA
tggagtctcgactagttttc

SEQ ID NO: 156555 - DNA, 20 bp, synthetic construct
  source 1..20: mol_type = other DNA
atggagtctcgactagtttt

SEQ ID NO: 156556 - DNA, 20 bp, synthetic construct
  source 1..20: mol_type = other DNA
aatggagtctcgactagttt

SEQ ID NO: 156557 - DNA, 20 bp, synthetic construct
  source 1..20: mol_type = other DNA
aaatggagtctcgactagtt

SEQ ID NO: 156558 - DNA, 20 bp, synthetic construct
  source 1..20: mol_type = other DNA
taaatggagtctcgactagt

SEQ ID NO: 156559 - DNA, 20 bp, synthetic construct
  source 1..20: mol_type = other DNA
ataaatggagtctcgactag

SEQ ID NO: 156560 - DNA, 20 bp, synthetic construct
  source 1..20: mol_type = other DNA
tataaatggagtctcgacta

SEQ ID NO: 156561 - DNA, 20 bp, synthetic construct
  source 1..20: mol_type = other DNA
atataaatggagtctcgact

SEQ ID NO: 156562 - DNA, 20 bp, synthetic construct
  source 1..20: mol_type = other DNA
catataaatggagtctcgac

SEQ ID NO: 156563 - DNA, 20 bp, synthetic construct
  source 1..20: mol_type = other DNA
acatataaatggagtctcga

SEQ ID NO: 156564 - DNA, 20 bp, synthetic construct
  source 1..20: mol_type = other DNA
cacatataaatggagtctcg

SEQ ID NO: 156565 - DNA, 20 bp, synthetic construct
  source 1..20: mol_type = other DNA
acacatataaatggagtctc

SEQ ID NO: 156566 - DNA, 20 bp, synthetic construct
  source 1..20: mol_type = other DNA
tacacatataaatggagtct

SEQ ID NO: 156567 - DNA, 20 bp, synthetic construct
  source 1..20: mol_type = other DNA
atacacatataaatggagtc

SEQ ID NO: 156568 - DNA, 20 bp, synthetic construct
  source 1..20: mol_type = other DNA
catacacatataaatggagt

SEQ ID NO: 156569 - DNA, 20 bp, synthetic construct
  source 1..20: mol_type = other DNA
acatacacatataaatggag

SEQ ID NO: 156570 - DNA, 20 bp, synthetic construct
  source 1..20: mol_type = other DNA
aacatacacatataaatgga

SEQ ID NO: 156571 - DNA, 20 bp, synthetic construct
  source 1..20: mol_type = other DNA
aaacatacacatataaatgg

SEQ ID NO: 156572 - DNA, 20 bp, synthetic construct
  source 1..20: mol_type = other DNA
aaaacatacacatataaatg

SEQ ID NO: 156573 - DNA, 20 bp, synthetic construct
  source 1..20: mol_type = other DNA
gaaaacatacacatataaat

SEQ ID NO: 156574 - DNA, 20 bp, synthetic construct
  source 1..20: mol_type = other DNA
agaaaacatacacatataaa

SEQ ID NO: 156575 - DNA, 20 bp, synthetic construct
  source 1..20: mol_type = other DNA
cagaaaacatacacatataa

SEQ ID NO: 156576 - DNA, 20 bp, synthetic construct
  source 1..20: mol_type = other DNA
tcagaaaacatacacatata

SEQ ID NO: 156577 - DNA, 20 bp, synthetic construct
  source 1..20: mol_type = other DNA
ttcagaaaacatacacatat

SEQ ID NO: 156578 - DNA, 20 bp, synthetic construct
  source 1..20: mol_type = other DNA
tttcagaaaacatacacata

SEQ ID NO: 156579 - DNA, 20 bp, synthetic construct
  source 1..20: mol_type = other DNA
ctttcagaaaacatacacat

SEQ ID NO: 156580 - DNA, 20 bp, synthetic construct
  source 1..20: mol_type = other DNA
gctttcagaaaacatacaca

SEQ ID NO: 156581 - DNA, 20 bp, synthetic construct
  source 1..20: mol_type = other DNA
ggctttcagaaaacatacac

SEQ ID NO: 156582 - DNA, 20 bp, synthetic construct
  source 1..20: mol_type = other DNA
aggctttcagaaaacataca

SEQ ID NO: 156583 - DNA, 20 bp, synthetic construct
  source 1..20: mol_type = other DNA
aaggctttcagaaaacatac

SEQ ID NO: 156584 - DNA, 20 bp, synthetic construct
  source 1..20: mol_type = other DNA
aaaggctttcagaaaacata

SEQ ID NO: 156585 - DNA, 20 bp, synthetic construct
  source 1..20: mol_type = other DNA
gaaaggctttcagaaaacat

SEQ ID NO: 156586 - DNA, 20 bp, synthetic construct
  source 1..20: mol_type = other DNA
tgaaaggctttcagaaaaca

SEQ ID NO: 156587 - DNA, 20 bp, synthetic construct
  source 1..20: mol_type = other DNA
ctgaaaggctttcagaaaac

SEQ ID NO: 156588 - DNA, 20 bp, synthetic construct
  source 1..20: mol_type = other DNA
tctgaaaggctttcagaaaa

SEQ ID NO: 156589 - DNA, 20 bp, synthetic construct
  source 1..20: mol_type = other DNA
ttctgaaaggctttcagaaa

SEQ ID NO: 156590 - DNA, 20 bp, synthetic construct
  source 1..20: mol_type = other DNA
tttctgaaaggctttcagaa

SEQ ID NO: 156591 - DNA, 20 bp, synthetic construct
  source 1..20: mol_type = other DNA
ttttctgaaaggctttcaga

SEQ ID NO: 156592 - DNA, 20 bp, synthetic construct
  source 1..20: mol_type = other DNA
tttttctgaaaggctttcag

SEQ ID NO: 156593 - DNA, 20 bp, synthetic construct
  source 1..20: mol_type = other DNA
atttttctgaaaggctttca

SEQ ID NO: 156594 - DNA, 20 bp, synthetic construct
  source 1..20: mol_type = other DNA
tatttttctgaaaggctttc

SEQ ID NO: 156595 - DNA, 20 bp, synthetic construct
  source 1..20: mol_type = other DNA
atatttttctgaaaggcttt

SEQ ID NO: 156596 - DNA, 20 bp, synthetic construct
  source 1..20: mol_type = other DNA
aatatttttctgaaaggctt

SEQ ID NO: 156597 - DNA, 20 bp, synthetic construct
  source 1..20: mol_type = other DNA
taatatttttctgaaaggct

SEQ ID NO: 156598 - DNA, 20 bp, synthetic construct
  source 1..20: mol_type = other DNA
ttaatatttttctgaaaggc

SEQ ID NO: 156599 - DNA, 20 bp, synthetic construct
  source 1..20: mol_type = other DNA
tttaatatttttctgaaagg

SEQ ID NO: 156600 - DNA, 20 bp, synthetic construct
  source 1..20: mol_type = other DNA
atttaatatttttctgaaag

SEQ ID NO: 156601 - DNA, 20 bp, synthetic construct
  source 1..20: mol_type = other DNA
aatttaatatttttctgaaa

SEQ ID NO: 156602 - DNA, 20 bp, synthetic construct
  source 1..20: mol_type = other DNA
aaatttaatatttttctgaa

SEQ ID NO: 156603 - DNA, 20 bp, synthetic construct
  source 1..20: mol_type = other DNA
taaatttaatatttttctga

SEQ ID NO: 156604 - DNA, 20 bp, synthetic construct
  source 1..20: mol_type = other DNA
ttaaatttaatatttttctg

SEQ ID NO: 156605 - DNA, 20 bp, synthetic construct
  source 1..20: mol_type = other DNA
cttaaatttaatatttttct

SEQ ID NO: 156606 - DNA, 20 bp, synthetic construct
  source 1..20: mol_type = other DNA
ccttaaatttaatatttttc

SEQ ID NO: 156607 - DNA, 20 bp, synthetic construct
  source 1..20: mol_type = other DNA
tccttaaatttaatattttt

SEQ ID NO: 156608 - DNA, 20 bp, synthetic construct
  source 1..20: mol_type = other DNA
gtccttaaatttaatatttt

SEQ ID NO: 156609 - DNA, 20 bp, synthetic construct
  source 1..20: mol_type = other DNA
tgtccttaaatttaatattt

SEQ ID NO: 156610 - DNA, 20 bp, synthetic construct
  source 1..20: mol_type = other DNA
ttgtccttaaatttaatatt

SEQ ID NO: 156611 - DNA, 20 bp, synthetic construct
  source 1..20: mol_type = other DNA
cttgtccttaaatttaatat

SEQ ID NO: 156612 - DNA, 20 bp, synthetic construct
  source 1..20: mol_type = other DNA
tcttgtccttaaatttaata

SEQ ID NO: 156613 - DNA, 20 bp, synthetic construct
  source 1..20: mol_type = other DNA
atcttgtccttaaatttaat

SEQ ID NO: 156614 - DNA, 20 bp, synthetic construct
  source 1..20: mol_type = other DNA
aatcttgtccttaaatttaa

SEQ ID NO: 156615 - DNA, 20 bp, synthetic construct
  source 1..20: mol_type = other DNA
aaatcttgtccttaaattta

SEQ ID NO: 156616 - DNA, 20 bp, synthetic construct
  source 1..20: mol_type = other DNA
aaaatcttgtccttaaattt

SEQ ID NO: 156617 - DNA, 20 bp, synthetic construct
  source 1..20: mol_type = other DNA
aaaaatcttgtccttaaatt

SEQ ID NO: 156618 - DNA, 20 bp, synthetic construct
  source 1..20: mol_type = other DNA
taaaaatcttgtccttaaat

SEQ ID NO: 156619 - DNA, 20 bp, synthetic construct
  source 1..20: mol_type = other DNA
ataaaaatcttgtccttaaa

SEQ ID NO: 156620 - DNA, 20 bp, synthetic construct
  source 1..20: mol_type = other DNA
tataaaaatcttgtccttaa

SEQ ID NO: 156621 - DNA, 20 bp, synthetic construct
  source 1..20: mol_type = other DNA
atataaaaatcttgtcctta

SEQ ID NO: 156622 - DNA, 20 bp, synthetic construct
  source 1..20: mol_type = other DNA
gatataaaaatcttgtcctt

SEQ ID NO: 156623 - DNA, 20 bp, synthetic construct
  source 1..20: mol_type = other DNA
tgatataaaaatcttgtcct

SEQ ID NO: 156624 - DNA, 20 bp, synthetic construct
  source 1..20: mol_type = other DNA
ctgatataaaaatcttgtcc

SEQ ID NO: 156625 - DNA, 20 bp, synthetic construct
  source 1..20: mol_type = other DNA
tctgatataaaaatcttgtc

SEQ ID NO: 156626 - DNA, 20 bp, synthetic construct
  source 1..20: mol_type = other DNA
ctctgatataaaaatcttgt

SEQ ID NO: 156627 - DNA, 20 bp, synthetic construct
  source 1..20: mol_type = other DNA
cctctgatataaaaatcttg

SEQ ID NO: 156628 - DNA, 20 bp, synthetic construct
  source 1..20: mol_type = other DNA
gcctctgatataaaaatctt

SEQ ID NO: 156629 - DNA, 20 bp, synthetic construct
  source 1..20: mol_type = other DNA
ggcctctgatataaaaatct

SEQ ID NO: 156630 - DNA, 20 bp, synthetic construct
  source 1..20: mol_type = other DNA
aggcctctgatataaaaatc

SEQ ID NO: 156631 - DNA, 20 bp, synthetic construct
  source 1..20: mol_type = other DNA
aaggcctctgatataaaaat

SEQ ID NO: 156632 - DNA, 20 bp, synthetic construct
  source 1..20: mol_type = other DNA
caaggcctctgatataaaaa

SEQ ID NO: 156633 - DNA, 20 bp, synthetic construct
  source 1..20: mol_type = other DNA
ccaaggcctctgatataaaa

SEQ ID NO: 156634 - DNA, 20 bp, synthetic construct
  source 1..20: mol_type = other DNA
cccaaggcctctgatataaa

SEQ ID NO: 156635 - DNA, 20 bp, synthetic construct
  source 1..20: mol_type = other DNA
tcccaaggcctctgatataa

SEQ ID NO: 156636 - DNA, 20 bp, synthetic construct
  source 1..20: mol_type = other DNA
gtcccaaggcctctgatata

SEQ ID NO: 156637 - DNA, 20 bp, synthetic construct
  source 1..20: mol_type = other DNA
tgtcccaaggcctctgatat

SEQ ID NO: 156638 - DNA, 20 bp, synthetic construct
  source 1..20: mol_type = other DNA
atgtcccaaggcctctgata

SEQ ID NO: 156639 - DNA, 20 bp, synthetic construct
  source 1..20: mol_type = other DNA
tatgtcccaaggcctctgat

SEQ ID NO: 156640 - DNA, 20 bp, synthetic construct
  source 1..20: mol_type = other DNA
ctatgtcccaaggcctctga

SEQ ID NO: 156641 - DNA, 20 bp, synthetic construct
  source 1..20: mol_type = other DNA
gctatgtcccaaggcctctg

SEQ ID NO: 156642 - DNA, 20 bp, synthetic construct
  source 1..20: mol_type = other DNA
agctatgtcccaaggcctct

SEQ ID NO: 156643 - DNA, 20 bp, synthetic construct
  source 1..20: mol_type = other DNA
aagctatgtcccaaggcctc

SEQ ID NO: 156644 - DNA, 20 bp, synthetic construct
  source 1..20: mol_type = other DNA
aaagctatgtcccaaggcct

SEQ ID NO: 156645 - DNA, 20 bp, synthetic construct
  source 1..20: mol_type = other DNA
caaagctatgtcccaaggcc

SEQ ID NO: 156646 - DNA, 20 bp, synthetic construct
  source 1..20: mol_type = other DNA
acaaagctatgtcccaaggc

SEQ ID NO: 156647 - DNA, 20 bp, synthetic construct
  source 1..20: mol_type = other DNA
aacaaagctatgtcccaagg

SEQ ID NO: 156648 - DNA, 20 bp, synthetic construct
  source 1..20: mol_type = other DNA
taacaaagctatgtcccaag

SEQ ID NO: 156649 - DNA, 20 bp, synthetic construct
  source 1..20: mol_type = other DNA
ctaacaaagctatgtcccaa

SEQ ID NO: 156650 - DNA, 20 bp, synthetic construct
  source 1..20: mol_type = other DNA
gctaacaaagctatgtccca

SEQ ID NO: 156651 - DNA, 20 bp, synthetic construct
  source 1..20: mol_type = other DNA
agctaacaaagctatgtccc

SEQ ID NO: 156652 - DNA, 20 bp, synthetic construct
  source 1..20: mol_type = other DNA
tagctaacaaagctatgtcc

SEQ ID NO: 156653 - DNA, 20 bp, synthetic construct
  source 1..20: mol_type = other DNA
atagctaacaaagctatgtc

SEQ ID NO: 156654 - DNA, 20 bp, synthetic construct
  source 1..20: mol_type = other DNA
catagctaacaaagctatgt

SEQ ID NO: 156655 - DNA, 20 bp, synthetic construct
  source 1..20: mol_type = other DNA
gcatagctaacaaagctatg

SEQ ID NO: 156656 - DNA, 20 bp, synthetic construct
  source 1..20: mol_type = other DNA
ggcatagctaacaaagctat

SEQ ID NO: 156657 - DNA, 20 bp, synthetic construct
  source 1..20: mol_type = other DNA
tggcatagctaacaaagcta

SEQ ID NO: 156658 - DNA, 20 bp, synthetic construct
  source 1..20: mol_type = other DNA
ctggcatagctaacaaagct

SEQ ID NO: 156659 - DNA, 20 bp, synthetic construct
  source 1..20: mol_type = other DNA
actggcatagctaacaaagc

SEQ ID NO: 156660 - DNA, 20 bp, synthetic construct
  source 1..20: mol_type = other DNA
tactggcatagctaacaaag

SEQ ID NO: 156661 - DNA, 20 bp, synthetic construct
  source 1..20: mol_type = other DNA
ttactggcatagctaacaaa

SEQ ID NO: 156662 - DNA, 20 bp, synthetic construct
  source 1..20: mol_type = other DNA
attactggcatagctaacaa

SEQ ID NO: 156663 - DNA, 20 bp, synthetic construct
  source 1..20: mol_type = other DNA
aattactggcatagctaaca

SEQ ID NO: 156664 - DNA, 20 bp, synthetic construct
  source 1..20: mol_type = other DNA
taattactggcatagctaac

SEQ ID NO: 156665 - DNA, 20 bp, synthetic construct
  source 1..20: mol_type = other DNA
ttaattactggcatagctaa

SEQ ID NO: 156666 - DNA, 20 bp, synthetic construct
  source 1..20: mol_type = other DNA
gttaattactggcatagcta

SEQ ID NO: 156667 - DNA, 20 bp, synthetic construct
  source 1..20: mol_type = other DNA
tgttaattactggcatagct

SEQ ID NO: 156668 - DNA, 20 bp, synthetic construct
  source 1..20: mol_type = other DNA
ctgttaattactggcatagc

SEQ ID NO: 156669 - DNA, 20 bp, synthetic construct
  source 1..20: mol_type = other DNA
cctgttaattactggcatag

SEQ ID NO: 156670 - DNA, 20 bp, synthetic construct
  source 1..20: mol_type = other DNA
gcctgttaattactggcata

SEQ ID NO: 156671 - DNA, 20 bp, synthetic construct
  source 1..20: mol_type = other DNA
tgcctgttaattactggcat

SEQ ID NO: 156672 - DNA, 20 bp, synthetic construct
  source 1..20: mol_type = other DNA
atgcctgttaattactggca

SEQ ID NO: 156673 - DNA, 20 bp, synthetic construct
  source 1..20: mol_type = other DNA
tatgcctgttaattactggc

SEQ ID NO: 156674 - DNA, 20 bp, synthetic construct
  source 1..20: mol_type = other DNA
ttatgcctgttaattactgg

SEQ ID NO: 156675 - DNA, 20 bp, synthetic construct
  source 1..20: mol_type = other DNA
gttatgcctgttaattactg

SEQ ID NO: 156676 - DNA, 20 bp, synthetic construct
  source 1..20: mol_type = other DNA
agttatgcctgttaattact

SEQ ID NO: 156677 - DNA, 20 bp, synthetic construct
  source 1..20: mol_type = other DNA
gagttatgcctgttaattac

SEQ ID NO: 156678 - DNA, 20 bp, synthetic construct
  source 1..20: mol_type = other DNA
tgagttatgcctgttaatta

SEQ ID NO: 156679 - DNA, 20 bp, synthetic construct
  source 1..20: mol_type = other DNA
ctgagttatgcctgttaatt

SEQ ID NO: 156680 - DNA, 20 bp, synthetic construct
  source 1..20: mol_type = other DNA
actgagttatgcctgttaat

SEQ ID NO: 156681 - DNA, 20 bp, synthetic construct
  source 1..20: mol_type = other DNA
tactgagttatgcctgttaa

SEQ ID NO: 156682 - DNA, 20 bp, synthetic construct
  source 1..20: mol_type = other DNA
ttactgagttatgcctgtta

SEQ ID NO: 156683 - DNA, 20 bp, synthetic construct
  source 1..20: mol_type = other DNA
gttactgagttatgcctgtt

SEQ ID NO: 156684 - DNA, 20 bp, synthetic construct
  source 1..20: mol_type = other DNA
agttactgagttatgcctgt

SEQ ID NO: 156685 - DNA, 20 bp, synthetic construct
  source 1..20: mol_type = other DNA
cagttactgagttatgcctg

SEQ ID NO: 156686 - DNA, 20 bp, synthetic construct
  source 1..20: mol_type = other DNA
tcagttactgagttatgcct

SEQ ID NO: 156687 - DNA, 20 bp, synthetic construct
  source 1..20: mol_type = other DNA
ctcagttactgagttatgcc

SEQ ID NO: 156688 - DNA, 20 bp, synthetic construct
  source 1..20: mol_type = other DNA
tctcagttactgagttatgc

SEQ ID NO: 156689 - DNA, 20 bp, synthetic construct
  source 1..20: mol_type = other DNA
ctctcagttactgagttatg

SEQ ID NO: 156690 - DNA, 20 bp, synthetic construct
  source 1..20: mol_type = other DNA
actctcagttactgagttat

SEQ ID NO: 156691 - DNA, 20 bp, synthetic construct
  source 1..20: mol_type = other DNA
aactctcagttactgagtta

SEQ ID NO: 156692 - DNA, 20 bp, synthetic construct
  source 1..20: mol_type = other DNA
aaactctcagttactgagtt

SEQ ID NO: 156693 - DNA, 20 bp, synthetic construct
  source 1..20: mol_type = other DNA
taaactctcagttactgagt

SEQ ID NO: 156694 - DNA, 20 bp, synthetic construct
  source 1..20: mol_type = other DNA
gtaaactctcagttactgag

SEQ ID NO: 156695 - DNA, 20 bp, synthetic construct
  source 1..20: mol_type = other DNA
ggtaaactctcagttactga

SEQ ID NO: 156696 - DNA, 20 bp, synthetic construct
  source 1..20: mol_type = other DNA
gggtaaactctcagttactg

SEQ ID NO: 156697 - DNA, 20 bp, synthetic construct
  source 1..20: mol_type = other DNA
agggtaaactctcagttact

SEQ ID NO: 156698 - DNA, 20 bp, synthetic construct
  source 1..20: mol_type = other DNA
aagggtaaactctcagttac

SEQ ID NO: 156699 - DNA, 20 bp, synthetic construct
  source 1..20: mol_type = other DNA
aaagggtaaactctcagtta

SEQ ID NO: 156700 - DNA, 20 bp, synthetic construct
  source 1..20: mol_type = other DNA
caaagggtaaactctcagtt

SEQ ID NO: 156701 - DNA, 20 bp, synthetic construct
  source 1..20: mol_type = other DNA
ccaaagggtaaactctcagt

SEQ ID NO: 156702 - DNA, 20 bp, synthetic construct
  source 1..20: mol_type = other DNA
accaaagggtaaactctcag

SEQ ID NO: 156703 - DNA, 20 bp, synthetic construct
  source 1..20: mol_type = other DNA
taccaaagggtaaactctca

SEQ ID NO: 156704 - DNA, 20 bp, synthetic construct
  source 1..20: mol_type = other DNA
gtaccaaagggtaaactctc

SEQ ID NO: 156705 - DNA, 20 bp, synthetic construct
  source 1..20: mol_type = other DNA
agtaccaaagggtaaactct

SEQ ID NO: 156706 - DNA, 20 bp, synthetic construct
  source 1..20: mol_type = other DNA
aagtaccaaagggtaaactc

SEQ ID NO: 156707 - DNA, 20 bp, synthetic construct
  source 1..20: mol_type = other DNA
gaagtaccaaagggtaaact

SEQ ID NO: 156708 - DNA, 20 bp, synthetic construct
  source 1..20: mol_type = other DNA
agaagtaccaaagggtaaac

SEQ ID NO: 156709 - DNA, 20 bp, synthetic construct
  source 1..20: mol_type = other DNA
cagaagtaccaaagggtaaa

SEQ ID NO: 156710 - DNA, 20 bp, synthetic construct
  source 1..20: mol_type = other DNA
tcagaagtaccaaagggtaa

SEQ ID NO: 156711 - DNA, 20 bp, synthetic construct
  source 1..20: mol_type = other DNA
ttcagaagtaccaaagggta

SEQ ID NO: 156712 - DNA, 20 bp, synthetic construct
  source 1..20: mol_type = other DNA
tttcagaagtaccaaagggt

SEQ ID NO: 156713 - DNA, 20 bp, synthetic construct
  source 1..20: mol_type = other DNA
atttcagaagtaccaaaggg

SEQ ID NO: 156714 - DNA, 20 bp, synthetic construct
  source 1..20: mol_type = other DNA
gatttcagaagtaccaaagg

SEQ ID NO: 156715 - DNA, 20 bp, synthetic construct
  source 1..20: mol_type = other DNA
tgatttcagaagtaccaaag

SEQ ID NO: 156716 - DNA, 20 bp, synthetic construct
  source 1..20: mol_type = other DNA
ctgatttcagaagtaccaaa

SEQ ID NO: 156717 - DNA, 20 bp, synthetic construct
  source 1..20: mol_type = other DNA
cctgatttcagaagtaccaa

SEQ ID NO: 156718 - DNA, 20 bp, synthetic construct
  source 1..20: mol_type = other DNA
acctgatttcagaagtacca

SEQ ID NO: 156719 - DNA, 20 bp, synthetic construct
  source 1..20: mol_type = other DNA
cacctgatttcagaagtacc

SEQ ID NO: 156720 - DNA, 20 bp, synthetic construct
  source 1..20: mol_type = other DNA
gcacctgatttcagaagtac

SEQ ID NO: 156721 - DNA, 20 bp, synthetic construct
  source 1..20: mol_type = other DNA
tgcacctgatttcagaagta

SEQ ID NO: 156722 - DNA, 20 bp, synthetic construct
  source 1..20: mol_type = other DNA
ctgcacctgatttcagaagt

SEQ ID NO: 156723 - DNA, 20 bp, synthetic construct
  source 1..20: mol_type = other DNA
gctgcacctgatttcagaag

SEQ ID NO: 156724 - DNA, 20 bp, synthetic construct
  source 1..20: mol_type = other DNA
ggctgcacctgatttcagaa

SEQ ID NO: 156725 - DNA, 20 bp, synthetic construct
  source 1..20: mol_type = other DNA
gggctgcacctgatttcaga

SEQ ID NO: 156726 - DNA, 20 bp, synthetic construct
  source 1..20: mol_type = other DNA
ggggctgcacctgatttcag

SEQ ID NO: 156727 - DNA, 20 bp, synthetic construct
  source 1..20: mol_type = other DNA
tggggctgcacctgatttca

SEQ ID NO: 156728 - DNA, 20 bp, synthetic construct
  source 1..20: mol_type = other DNA
atggggctgcacctgatttc

SEQ ID NO: 156729 - DNA, 20 bp, synthetic construct
  source 1..20: mol_type = other DNA
gatggggctgcacctgattt

SEQ ID NO: 156730 - DNA, 20 bp, synthetic construct
  source 1..20: mol_type = other DNA
agatggggctgcacctgatt

SEQ ID NO: 156731 - DNA, 20 bp, synthetic construct
  source 1..20: mol_type = other DNA
aagatggggctgcacctgat

SEQ ID NO: 156732 - DNA, 20 bp, synthetic construct
  source 1..20: mol_type = other DNA
aaagatggggctgcacctga

SEQ ID NO: 156733 - DNA, 20 bp, synthetic construct
  source 1..20: mol_type = other DNA
gaaagatggggctgcacctg

SEQ ID NO: 156734 - DNA, 20 bp, synthetic construct
  source 1..20: mol_type = other DNA
agaaagatggggctgcacct

SEQ ID NO: 156735 - DNA, 20 bp, synthetic construct
  source 1..20: mol_type = other DNA
aagaaagatggggctgcacc

SEQ ID NO: 156736 - DNA, 20 bp, synthetic construct
  source 1..20: mol_type = other DNA
gaagaaagatggggctgcac

SEQ ID NO: 156737 - DNA, 20 bp, synthetic construct
  source 1..20: mol_type = other DNA
ggaagaaagatggggctgca

SEQ ID NO: 156738 - DNA, 20 bp, synthetic construct
  source 1..20: mol_type = other DNA
gggaagaaagatggggctgc

SEQ ID NO: 156739 - DNA, 20 bp, synthetic construct
  source 1..20: mol_type = other DNA
tgggaagaaagatggggctg

SEQ ID NO: 156740 - DNA, 20 bp, synthetic construct
  source 1..20: mol_type = other DNA
ctgggaagaaagatggggct

SEQ ID NO: 156741 - DNA, 20 bp, synthetic construct
  source 1..20: mol_type = other DNA
tctgggaagaaagatggggc

SEQ ID NO: 156742 - DNA, 20 bp, synthetic construct
  source 1..20: mol_type = other DNA
ctctgggaagaaagatgggg

SEQ ID NO: 156743 - DNA, 20 bp, synthetic construct
  source 1..20: mol_type = other DNA
gctctgggaagaaagatggg

SEQ ID NO: 156744 - DNA, 20 bp, synthetic construct
  source 1..20: mol_type = other DNA
tgctctgggaagaaagatgg

SEQ ID NO: 156745 - DNA, 20 bp, synthetic construct
  source 1..20: mol_type = other DNA
atgctctgggaagaaagatg

SEQ ID NO: 156746 - DNA, 20 bp, synthetic construct
  source 1..20: mol_type = other DNA
aatgctctgggaagaaagat

SEQ ID NO: 156747 - DNA, 20 bp, synthetic construct
  source 1..20: mol_type = other DNA
taatgctctgggaagaaaga

SEQ ID NO: 156748 - DNA, 20 bp, synthetic construct
  source 1..20: mol_type = other DNA
ctaatgctctgggaagaaag

SEQ ID NO: 156749 - DNA, 20 bp, synthetic construct
  source 1..20: mol_type = other DNA
actaatgctctgggaagaaa

SEQ ID NO: 156750 - DNA, 20 bp, synthetic construct
  source 1..20: mol_type = other DNA
cactaatgctctgggaagaa

SEQ ID NO: 156751 - DNA, 20 bp, synthetic construct
  source 1..20: mol_type = other DNA
acactaatgctctgggaaga

SEQ ID NO: 156752 - DNA, 20 bp, synthetic construct
  source 1..20: mol_type = other DNA
cacactaatgctctgggaag

SEQ ID NO: 156753 - DNA, 20 bp, synthetic construct
  source 1..20: mol_type = other DNA
acacactaatgctctgggaa

SEQ ID NO: 156754 - DNA, 20 bp, synthetic construct
  source 1..20: mol_type = other DNA
tacacactaatgctctggga

SEQ ID NO: 156755 - DNA, 20 bp, synthetic construct
  source 1..20: mol_type = other DNA
ctacacactaatgctctggg

SEQ ID NO: 156756 - DNA, 20 bp, synthetic construct
  source 1..20: mol_type = other DNA
tctacacactaatgctctgg

SEQ ID NO: 156757 - DNA, 20 bp, synthetic construct
  source 1..20: mol_type = other DNA
gtctacacactaatgctctg

SEQ ID NO: 156758 - DNA, 20 bp, synthetic construct
  source 1..20: mol_type = other DNA
cgtctacacactaatgctct

SEQ ID NO: 156759 - DNA, 20 bp, synthetic construct
  source 1..20: mol_type = other DNA
acgtctacacactaatgctc

SEQ ID NO: 156760 - DNA, 20 bp, synthetic construct
  source 1..20: mol_type = other DNA
cacgtctacacactaatgct

SEQ ID NO: 156761 - DNA, 20 bp, synthetic construct
  source 1..20: mol_type = other DNA
tcacgtctacacactaatgc

SEQ ID NO: 156762 - DNA, 20 bp, synthetic construct
  source 1..20: mol_type = other DNA
ttcacgtctacacactaatg

SEQ ID NO: 156763 - DNA, 20 bp, synthetic construct
  source 1..20: mol_type = other DNA
cttcacgtctacacactaat

SEQ ID NO: 156764 - DNA, 20 bp, synthetic construct
  source 1..20: mol_type = other DNA
gcttcacgtctacacactaa

SEQ ID NO: 156765 - DNA, 20 bp, synthetic construct
  source 1..20: mol_type = other DNA
ggcttcacgtctacacacta

SEQ ID NO: 156766 - DNA, 20 bp, synthetic construct
  source 1..20: mol_type = other DNA
aggcttcacgtctacacact

SEQ ID NO: 156767 - DNA, 20 bp, synthetic construct
  source 1..20: mol_type = other DNA
aaggcttcacgtctacacac

SEQ ID NO: 156768 - DNA, 20 bp, synthetic construct
  source 1..20: mol_type = other DNA
caaggcttcacgtctacaca

SEQ ID NO: 156769 - DNA, 20 bp, synthetic construct
  source 1..20: mol_type = other DNA
acaaggcttcacgtctacac

SEQ ID NO: 156770 - DNA, 20 bp, synthetic construct
  source 1..20: mol_type = other DNA
aacaaggcttcacgtctaca

SEQ ID NO: 156771 - DNA, 20 bp, synthetic construct
  source 1..20: mol_type = other DNA
aaacaaggcttcacgtctac

SEQ ID NO: 156772 - DNA, 20 bp, synthetic construct
  source 1..20: mol_type = other DNA
caaacaaggcttcacgtcta

SEQ ID NO: 156773 - DNA, 20 bp, synthetic construct
  source 1..20: mol_type = other DNA
tcaaacaaggcttcacgtct

SEQ ID NO: 156774 - DNA, 20 bp, synthetic construct
  source 1..20: mol_type = other DNA
ttcaaacaaggcttcacgtc

SEQ ID NO: 156775 - DNA, 20 bp, synthetic construct
  source 1..20: mol_type = other DNA
cttcaaacaaggcttcacgt

SEQ ID NO: 156776 - DNA, 20 bp, synthetic construct
  source 1..20: mol_type = other DNA
tcttcaaacaaggcttcacg

SEQ ID NO: 156777 - DNA, 20 bp, synthetic construct
  source 1..20: mol_type = other DNA
ctcttcaaacaaggcttcac

SEQ ID NO: 156778 - DNA, 20 bp, synthetic construct
  source 1..20: mol_type = other DNA
gctcttcaaacaaggcttca

SEQ ID NO: 156779 - DNA, 20 bp, synthetic construct
  source 1..20: mol_type = other DNA
agctcttcaaacaaggcttc

SEQ ID NO: 156780 - DNA, 20 bp, synthetic construct
  source 1..20: mol_type = other DNA
cagctcttcaaacaaggctt

SEQ ID NO: 156781 - DNA, 20 bp, synthetic construct
  source 1..20: mol_type = other DNA
acagctcttcaaacaaggct

SEQ ID NO: 156782 - DNA, 20 bp, synthetic construct
  source 1..20: mol_type = other DNA
tacagctcttcaaacaaggc

SEQ ID NO: 156783 - DNA, 20 bp, synthetic construct
  source 1..20: mol_type = other DNA
atacagctcttcaaacaagg

SEQ ID NO: 156784 - DNA, 20 bp, synthetic construct
  source 1..20: mol_type = other DNA
aatacagctcttcaaacaag

SEQ ID NO: 156785 - DNA, 20 bp, synthetic construct
  source 1..20: mol_type = other DNA
aaatacagctcttcaaacaa

SEQ ID NO: 156786 - DNA, 20 bp, synthetic construct
  source 1..20: mol_type = other DNA
taaatacagctcttcaaaca

SEQ ID NO: 156787 - DNA, 20 bp, synthetic construct
  source 1..20: mol_type = other DNA
ctaaatacagctcttcaaac

SEQ ID NO: 156788 - DNA, 20 bp, synthetic construct
  source 1..20: mol_type = other DNA
tctaaatacagctcttcaaa

SEQ ID NO: 156789 - DNA, 20 bp, synthetic construct
  source 1..20: mol_type = other DNA
ttctaaatacagctcttcaa

SEQ ID NO: 156790 - DNA, 20 bp, synthetic construct
  source 1..20: mol_type = other DNA
attctaaatacagctcttca

SEQ ID NO: 156791 - DNA, 20 bp, synthetic construct
  source 1..20: mol_type = other DNA
cattctaaatacagctcttc

SEQ ID NO: 156792 - DNA, 20 bp, synthetic construct
  source 1..20: mol_type = other DNA
gcattctaaatacagctctt

SEQ ID NO: 156793 - DNA, 20 bp, synthetic construct
  source 1..20: mol_type = other DNA
ggcattctaaatacagctct

SEQ ID NO: 156794 - DNA, 20 bp, synthetic construct
  source 1..20: mol_type = other DNA
aggcattctaaatacagctc

SEQ ID NO: 156795 - DNA, 20 bp, synthetic construct
  source 1..20: mol_type = other DNA
taggcattctaaatacagct

SEQ ID NO: 156796 - DNA, 20 bp, synthetic construct
  source 1..20: mol_type = other DNA
ctaggcattctaaatacagc

SEQ ID NO: 156797 - DNA, 20 bp, synthetic construct
  source 1..20: mol_type = other DNA
gctaggcattctaaatacag

SEQ ID NO: 156798 - DNA, 20 bp, synthetic construct
  source 1..20: mol_type = other DNA
agctaggcattctaaataca

SEQ ID NO: 156799 - DNA, 20 bp, synthetic construct
  source 1..20: mol_type = other DNA
tagctaggcattctaaatac

SEQ ID NO: 156800 - DNA, 20 bp, synthetic construct
  source 1..20: mol_type = other DNA
gtagctaggcattctaaata

SEQ ID NO: 156801 - DNA, 20 bp, synthetic construct
  source 1..20: mol_type = other DNA
agtagctaggcattctaaat

SEQ ID NO: 156802 - DNA, 20 bp, synthetic construct
  source 1..20: mol_type = other DNA
aagtagctaggcattctaaa

SEQ ID NO: 156803 - DNA, 20 bp, synthetic construct
  source 1..20: mol_type = other DNA
caagtagctaggcattctaa

SEQ ID NO: 156804 - DNA, 20 bp, synthetic construct
  source 1..20: mol_type = other DNA
acaagtagctaggcattcta

SEQ ID NO: 156805 - DNA, 20 bp, synthetic construct
  source 1..20: mol_type = other DNA
aacaagtagctaggcattct

SEQ ID NO: 156806 - DNA, 20 bp, synthetic construct
  source 1..20: mol_type = other DNA
aaacaagtagctaggcattc

SEQ ID NO: 156807 - DNA, 20 bp, synthetic construct
  source 1..20: mol_type = other DNA
caaacaagtagctaggcatt

SEQ ID NO: 156808 - DNA, 20 bp, synthetic construct
  source 1..20: mol_type = other DNA
gcaaacaagtagctaggcat

SEQ ID NO: 156809 - DNA, 20 bp, synthetic construct
  source 1..20: mol_type = other DNA
tgcaaacaagtagctaggca

SEQ ID NO: 156810 - DNA, 20 bp, synthetic construct
  source 1..20: mol_type = other DNA
ttgcaaacaagtagctaggc

SEQ ID NO: 156811 - DNA, 20 bp, synthetic construct
  source 1..20: mol_type = other DNA
tttgcaaacaagtagctagg

SEQ ID NO: 156812 - DNA, 20 bp, synthetic construct
  source 1..20: mol_type = other DNA
atttgcaaacaagtagctag

SEQ ID NO: 156813 - DNA, 20 bp, synthetic construct
  source 1..20: mol_type = other DNA
aatttgcaaacaagtagcta

SEQ ID NO: 156814 - DNA, 20 bp, synthetic construct
  source 1..20: mol_type = other DNA
aaatttgcaaacaagtagct

SEQ ID NO: 156815 - DNA, 20 bp, synthetic construct
  source 1..20: mol_type = other DNA
caaatttgcaaacaagtagc

SEQ ID NO: 156816 - DNA, 20 bp, synthetic construct
  source 1..20: mol_type = other DNA
acaaatttgcaaacaagtag

SEQ ID NO: 156817 - DNA, 20 bp, synthetic construct
  source 1..20: mol_type = other DNA
cacaaatttgcaaacaagta

SEQ ID NO: 156818 - DNA, 20 bp, synthetic construct
  source 1..20: mol_type = other DNA
acacaaatttgcaaacaagt

SEQ ID NO: 156819 - DNA, 20 bp, synthetic construct
  source 1..20: mol_type = other DNA
gacacaaatttgcaaacaag

SEQ ID NO: 156820 - DNA, 20 bp, synthetic construct
  source 1..20: mol_type = other DNA
agacacaaatttgcaaacaa

SEQ ID NO: 156821 - DNA, 20 bp, synthetic construct
  source 1..20: mol_type = other DNA
tagacacaaatttgcaaaca

SEQ ID NO: 156822 - DNA, 20 bp, synthetic construct
  source 1..20: mol_type = other DNA
gtagacacaaatttgcaaac

SEQ ID NO: 156823 - DNA, 20 bp, synthetic construct
  source 1..20: mol_type = other DNA
agtagacacaaatttgcaaa

SEQ ID NO: 156824 - DNA, 20 bp, synthetic construct
  source 1..20: mol_type = other DNA
gagtagacacaaatttgcaa

SEQ ID NO: 156825 - DNA, 20 bp, synthetic construct
  source 1..20: mol_type = other DNA
tgagtagacacaaatttgca

SEQ ID NO: 156826 - DNA, 20 bp, synthetic construct
  source 1..20: mol_type = other DNA
ctgagtagacacaaatttgc

SEQ ID NO: 156827 - DNA, 20 bp, synthetic construct
  source 1..20: mol_type = other DNA
actgagtagacacaaatttg

SEQ ID NO: 156828 - DNA, 20 bp, synthetic construct
  source 1..20: mol_type = other DNA
gactgagtagacacaaattt

SEQ ID NO: 156829 - DNA, 20 bp, synthetic construct
  source 1..20: mol_type = other DNA
tgactgagtagacacaaatt

SEQ ID NO: 156830 - DNA, 20 bp, synthetic construct
  source 1..20: mol_type = other DNA
ttgactgagtagacacaaat

SEQ ID NO: 156831 - DNA, 20 bp, synthetic construct
  source 1..20: mol_type = other DNA
cttgactgagtagacacaaa

SEQ ID NO: 156832 - DNA, 20 bp, synthetic construct
  source 1..20: mol_type = other DNA
acttgactgagtagacacaa

SEQ ID NO: 156833 - DNA, 20 bp, synthetic construct
  source 1..20: mol_type = other DNA
aacttgactgagtagacaca

SEQ ID NO: 156834 - DNA, 20 bp, synthetic construct
  source 1..20: mol_type = other DNA
aaacttgactgagtagacac

SEQ ID NO: 156835 - DNA, 20 bp, synthetic construct
  source 1..20: mol_type = other DNA
aaaacttgactgagtagaca

SEQ ID NO: 156836 - DNA, 20 bp, synthetic construct
  source 1..20: mol_type = other DNA
taaaacttgactgagtagac

SEQ ID NO: 156837 - DNA, 20 bp, synthetic construct
  source 1..20: mol_type = other DNA
ttaaaacttgactgagtaga

SEQ ID NO: 156838 - DNA, 20 bp, synthetic construct
  source 1..20: mol_type = other DNA
attaaaacttgactgagtag

SEQ ID NO: 156839 - DNA, 20 bp, synthetic construct
  source 1..20: mol_type = other DNA
aattaaaacttgactgagta

SEQ ID NO: 156840 - DNA, 20 bp, synthetic construct
  source 1..20: mol_type = other DNA
aaattaaaacttgactgagt

SEQ ID NO: 156841 - DNA, 20 bp, synthetic construct
  source 1..20: mol_type = other DNA
taaattaaaacttgactgag

SEQ ID NO: 156842 - DNA, 20 bp, synthetic construct
  source 1..20: mol_type = other DNA
ctaaattaaaacttgactga

SEQ ID NO: 156843 - DNA, 20 bp, synthetic construct
  source 1..20: mol_type = other DNA
gctaaattaaaacttgactg

SEQ ID NO: 156844 - DNA, 20 bp, synthetic construct
  source 1..20: mol_type = other DNA
agctaaattaaaacttgact

SEQ ID NO: 156845 - DNA, 20 bp, synthetic construct
  source 1..20: mol_type = other DNA
gagctaaattaaaacttgac

SEQ ID NO: 156846 - DNA, 20 bp, synthetic construct
  source 1..20: mol_type = other DNA
tgagctaaattaaaacttga

SEQ ID NO: 156847 - DNA, 20 bp, synthetic construct
  source 1..20: mol_type = other DNA
atgagctaaattaaaacttg

SEQ ID NO: 156848 - DNA, 20 bp, synthetic construct
  source 1..20: mol_type = other DNA
catgagctaaattaaaactt

SEQ ID NO: 156849 - DNA, 20 bp, synthetic construct
  source 1..20: mol_type = other DNA
tcatgagctaaattaaaact

SEQ ID NO: 156850 - DNA, 20 bp, synthetic construct
  source 1..20: mol_type = other DNA
ttcatgagctaaattaaaac

SEQ ID NO: 156851 - DNA, 20 bp, synthetic construct
  source 1..20: mol_type = other DNA
gttcatgagctaaattaaaa

SEQ ID NO: 156852 - DNA, 20 bp, synthetic construct
  source 1..20: mol_type = other DNA
agttcatgagctaaattaaa

SEQ ID NO: 156853 - DNA, 20 bp, synthetic construct
  source 1..20: mol_type = other DNA
tagttcatgagctaaattaa

SEQ ID NO: 156854 - DNA, 20 bp, synthetic construct
  source 1..20: mol_type = other DNA
gtagttcatgagctaaatta

SEQ ID NO: 156855 - DNA, 20 bp, synthetic construct
  source 1..20: mol_type = other DNA
ggtagttcatgagctaaatt

SEQ ID NO: 156856 - DNA, 20 bp, synthetic construct
  source 1..20: mol_type = other DNA
aggtagttcatgagctaaat

SEQ ID NO: 156857 - DNA, 20 bp, synthetic construct
  source 1..20: mol_type = other DNA
aaggtagttcatgagctaaa

SEQ ID NO: 156858 - DNA, 20 bp, synthetic construct
  source 1..20: mol_type = other DNA
caaggtagttcatgagctaa

SEQ ID NO: 156859 - DNA, 20 bp, synthetic construct
  source 1..20: mol_type = other DNA
tcaaggtagttcatgagcta

SEQ ID NO: 156860 - DNA, 20 bp, synthetic construct
  source 1..20: mol_type = other DNA
atcaaggtagttcatgagct

SEQ ID NO: 156861 - DNA, 20 bp, synthetic construct
  source 1..20: mol_type = other DNA
catcaaggtagttcatgagc

SEQ ID NO: 156862 - DNA, 20 bp, synthetic construct
  source 1..20: mol_type = other DNA
acatcaaggtagttcatgag

SEQ ID NO: 156863 - DNA, 20 bp, synthetic construct
  source 1..20: mol_type = other DNA
aacatcaaggtagttcatga

SEQ ID NO: 156864 - DNA, 20 bp, synthetic construct
  source 1..20: mol_type = other DNA
aaacatcaaggtagttcatg

SEQ ID NO: 156865 - DNA, 20 bp, synthetic construct
  source 1..20: mol_type = other DNA
taaacatcaaggtagttcat

SEQ ID NO: 156866 - DNA, 20 bp, synthetic construct
  source 1..20: mol_type = other DNA
ctaaacatcaaggtagttca

SEQ ID NO: 156867 - DNA, 20 bp, synthetic construct
  source 1..20: mol_type = other DNA
actaaacatcaaggtagttc

SEQ ID NO: 156868 - DNA, 20 bp, synthetic construct
  source 1..20: mol_type = other DNA
cactaaacatcaaggtagtt

SEQ ID NO: 156869 - DNA, 20 bp, synthetic construct
  source 1..20: mol_type = other DNA
ccactaaacatcaaggtagt

SEQ ID NO: 156870 - DNA, 20 bp, synthetic construct
  source 1..20: mol_type = other DNA
gccactaaacatcaaggtag

SEQ ID NO: 156871 - DNA, 20 bp, synthetic construct
  source 1..20: mol_type = other DNA
tgccactaaacatcaaggta

SEQ ID NO: 156872 - DNA, 20 bp, synthetic construct
  source 1..20: mol_type = other DNA
atgccactaaacatcaaggt

SEQ ID NO: 156873 - DNA, 20 bp, synthetic construct
  source 1..20: mol_type = other DNA
gatgccactaaacatcaagg

SEQ ID NO: 156874 - DNA, 20 bp, synthetic construct
  source 1..20: mol_type = other DNA
tgatgccactaaacatcaag

SEQ ID NO: 156875 - DNA, 20 bp, synthetic construct
  source 1..20: mol_type = other DNA
ctgatgccactaaacatcaa

SEQ ID NO: 156876 - DNA, 20 bp, synthetic construct
  source 1..20: mol_type = other DNA
gctgatgccactaaacatca

SEQ ID NO: 156877 - DNA, 20 bp, synthetic construct
  source 1..20: mol_type = other DNA
ggctgatgccactaaacatc

SEQ ID NO: 156878 - DNA, 20 bp, synthetic construct
  source 1..20: mol_type = other DNA
gggctgatgccactaaacat

SEQ ID NO: 156879 - DNA, 20 bp, synthetic construct
  source 1..20: mol_type = other DNA
agggctgatgccactaaaca

SEQ ID NO: 156880 - DNA, 20 bp, synthetic construct
  source 1..20: mol_type = other DNA
tagggctgatgccactaaac

SEQ ID NO: 156881 - DNA, 20 bp, synthetic construct
  source 1..20: mol_type = other DNA
ttagggctgatgccactaaa

SEQ ID NO: 156882 - DNA, 20 bp, synthetic construct
  source 1..20: mol_type = other DNA
attagggctgatgccactaa

SEQ ID NO: 156883 - DNA, 20 bp, synthetic construct
  source 1..20: mol_type = other DNA
gattagggctgatgccacta

SEQ ID NO: 156884 - DNA, 20 bp, synthetic construct
  source 1..20: mol_type = other DNA
ggattagggctgatgccact

SEQ ID NO: 156885 - DNA, 20 bp, synthetic construct
  source 1..20: mol_type = other DNA
tggattagggctgatgccac

SEQ ID NO: 156886 - DNA, 20 bp, synthetic construct
  source 1..20: mol_type = other DNA
atggattagggctgatgcca

SEQ ID NO: 156887 - DNA, 20 bp, synthetic construct
  source 1..20: mol_type = other DNA
gatggattagggctgatgcc

SEQ ID NO: 156888 - DNA, 20 bp, synthetic construct
  source 1..20: mol_type = other DNA
agatggattagggctgatgc

SEQ ID NO: 156889 - DNA, 20 bp, synthetic construct
  source 1..20: mol_type = other DNA
cagatggattagggctgatg

SEQ ID NO: 156890 - DNA, 20 bp, synthetic construct
  source 1..20: mol_type = other DNA
tcagatggattagggctgat

SEQ ID NO: 156891 - DNA, 20 bp, synthetic construct
  source 1..20: mol_type = other DNA
atcagatggattagggctga

SEQ ID NO: 156892 - DNA, 20 bp, synthetic construct
  source 1..20: mol_type = other DNA
catcagatggattagggctg

SEQ ID NO: 156893 - DNA, 20 bp, synthetic construct
  source 1..20: mol_type = other DNA
gcatcagatggattagggct

SEQ ID NO: 156894 - DNA, 20 bp, synthetic construct
  source 1..20: mol_type = other DNA
agcatcagatggattagggc

SEQ ID NO: 156895 - DNA, 20 bp, synthetic construct
  source 1..20: mol_type = other DNA
aagcatcagatggattaggg

SEQ ID NO: 156896 - DNA, 20 bp, synthetic construct
  source 1..20: mol_type = other DNA
aaagcatcagatggattagg

SEQ ID NO: 156897 - DNA, 20 bp, synthetic construct
  source 1..20: mol_type = other DNA
aaaagcatcagatggattag

SEQ ID NO: 156898 - DNA, 20 bp, synthetic construct
  source 1..20: mol_type = other DNA
aaaaagcatcagatggatta

SEQ ID NO: 156899 - DNA, 20 bp, synthetic construct
  source 1..20: mol_type = other DNA
gaaaaagcatcagatggatt

SEQ ID NO: 156900 - DNA, 20 bp, synthetic construct
  source 1..20: mol_type = other DNA
tgaaaaagcatcagatggat

SEQ ID NO: 156901 - DNA, 20 bp, synthetic construct
  source 1..20: mol_type = other DNA
atgaaaaagcatcagatgga

SEQ ID NO: 156902 - DNA, 20 bp, synthetic construct
  source 1..20: mol_type = other DNA
aatgaaaaagcatcagatgg

SEQ ID NO: 156903 - DNA, 20 bp, synthetic construct
  source 1..20: mol_type = other DNA
taatgaaaaagcatcagatg

SEQ ID NO: 156904 - DNA, 20 bp, synthetic construct
  source 1..20: mol_type = other DNA
ataatgaaaaagcatcagat

SEQ ID NO: 156905 - DNA, 20 bp, synthetic construct
  source 1..20: mol_type = other DNA
aataatgaaaaagcatcaga

SEQ ID NO: 156906 - DNA, 20 bp, synthetic construct
  source 1..20: mol_type = other DNA
taataatgaaaaagcatcag

SEQ ID NO: 156907 - DNA, 20 bp, synthetic construct
  source 1..20: mol_type = other DNA
ctaataatgaaaaagcatca

SEQ ID NO: 156908 - DNA, 20 bp, synthetic construct
  source 1..20: mol_type = other DNA
cctaataatgaaaaagcatc

SEQ ID NO: 156909 - DNA, 20 bp, synthetic construct
  source 1..20: mol_type = other DNA
gcctaataatgaaaaagcat

SEQ ID NO: 156910 - DNA, 20 bp, synthetic construct
  source 1..20: mol_type = other DNA
tgcctaataatgaaaaagca

SEQ ID NO: 156911 - DNA, 20 bp, synthetic construct
  source 1..20: mol_type = other DNA
atgcctaataatgaaaaagc

SEQ ID NO: 156912 - DNA, 20 bp, synthetic construct
  source 1..20: mol_type = other DNA
catgcctaataatgaaaaag

SEQ ID NO: 156913 - DNA, 20 bp, synthetic construct
  source 1..20: mol_type = other DNA
acatgcctaataatgaaaaa

SEQ ID NO: 156914 - DNA, 20 bp, synthetic construct
  source 1..20: mol_type = other DNA
aacatgcctaataatgaaaa

SEQ ID NO: 156915 - DNA, 20 bp, synthetic construct
  source 1..20: mol_type = other DNA
caacatgcctaataatgaaa

SEQ ID NO: 156916 - DNA, 20 bp, synthetic construct
  source 1..20: mol_type = other DNA
ccaacatgcctaataatgaa

SEQ ID NO: 156917 - DNA, 20 bp, synthetic construct
  source 1..20: mol_type = other DNA
tccaacatgcctaataatga

SEQ ID NO: 156918 - DNA, 20 bp, synthetic construct
  source 1..20: mol_type = other DNA
ctccaacatgcctaataatg

SEQ ID NO: 156919 - DNA, 20 bp, synthetic construct
  source 1..20: mol_type = other DNA
tctccaacatgcctaataat

SEQ ID NO: 156920 - DNA, 20 bp, synthetic construct
  source 1..20: mol_type = other DNA
gtctccaacatgcctaataa

SEQ ID NO: 156921 - DNA, 20 bp, synthetic construct
  source 1..20: mol_type = other DNA
agtctccaacatgcctaata

SEQ ID NO: 156922 - DNA, 20 bp, synthetic construct
  source 1..20: mol_type = other DNA
aagtctccaacatgcctaat

SEQ ID NO: 156923 - DNA, 20 bp, synthetic construct
  source 1..20: mol_type = other DNA
caagtctccaacatgcctaa

SEQ ID NO: 156924 - DNA, 20 bp, synthetic construct
  source 1..20: mol_type = other DNA
ccaagtctccaacatgccta

SEQ ID NO: 156925 - DNA, 20 bp, synthetic construct
  source 1..20: mol_type = other DNA
cccaagtctccaacatgcct

SEQ ID NO: 156926 - DNA, 20 bp, synthetic construct
  source 1..20: mol_type = other DNA
gcccaagtctccaacatgcc

SEQ ID NO: 156927 - DNA, 20 bp, synthetic construct
  source 1..20: mol_type = other DNA
tgcccaagtctccaacatgc

SEQ ID NO: 156928 - DNA, 20 bp, synthetic construct
  source 1..20: mol_type = other DNA
ttgcccaagtctccaacatg

SEQ ID NO: 156929 - DNA, 20 bp, synthetic construct
  source 1..20: mol_type = other DNA
attgcccaagtctccaacat

SEQ ID NO: 156930 - DNA, 20 bp, synthetic construct
  source 1..20: mol_type = other DNA
cattgcccaagtctccaaca

SEQ ID NO: 156931 - DNA, 20 bp, synthetic construct
  source 1..20: mol_type = other DNA
acattgcccaagtctccaac

SEQ ID NO: 156932 - DNA, 20 bp, synthetic construct
  source 1..20: mol_type = other DNA
cacattgcccaagtctccaa

SEQ ID NO: 156933 - DNA, 20 bp, synthetic construct
  source 1..20: mol_type = other DNA
tcacattgcccaagtctcca

SEQ ID NO: 156934 - DNA, 20 bp, synthetic construct
  source 1..20: mol_type = other DNA
gtcacattgcccaagtctcc

SEQ ID NO: 156935 - DNA, 20 bp, synthetic construct
  source 1..20: mol_type = other DNA
agtcacattgcccaagtctc

SEQ ID NO: 156936 - DNA, 20 bp, synthetic construct
  source 1..20: mol_type = other DNA
cagtcacattgcccaagtct

SEQ ID NO: 156937 - DNA, 20 bp, synthetic construct
  source 1..20: mol_type = other DNA
gcagtcacattgcccaagtc

SEQ ID NO: 156938 - DNA, 20 bp, synthetic construct
  source 1..20: mol_type = other DNA
agcagtcacattgcccaagt

SEQ ID NO: 156939 - DNA, 20 bp, synthetic construct
  source 1..20: mol_type = other DNA
cagcagtcacattgcccaag

SEQ ID NO: 156940 - DNA, 20 bp, synthetic construct
  source 1..20: mol_type = other DNA
tcagcagtcacattgcccaa

SEQ ID NO: 156941 - DNA, 20 bp, synthetic construct
  source 1..20: mol_type = other DNA
gtcagcagtcacattgccca

SEQ ID NO: 156942 - DNA, 20 bp, synthetic construct
  source 1..20: mol_type = other DNA
tgtcagcagtcacattgccc

SEQ ID NO: 156943 - DNA, 20 bp, synthetic construct
  source 1..20: mol_type = other DNA
ttgtcagcagtcacattgcc

SEQ ID NO: 156944 - DNA, 20 bp, synthetic construct
  source 1..20: mol_type = other DNA
tttgtcagcagtcacattgc

SEQ ID NO: 156945 - DNA, 20 bp, synthetic construct
  source 1..20: mol_type = other DNA
ctttgtcagcagtcacattg

SEQ ID NO: 156946 - DNA, 20 bp, synthetic construct
  source 1..20: mol_type = other DNA
tctttgtcagcagtcacatt

SEQ ID NO: 156947 - DNA, 20 bp, synthetic construct
  source 1..20: mol_type = other DNA
atctttgtcagcagtcacat

SEQ ID NO: 156948 - DNA, 20 bp, synthetic construct
  source 1..20: mol_type = other DNA
catctttgtcagcagtcaca

SEQ ID NO: 156949 - DNA, 20 bp, synthetic construct
  source 1..20: mol_type = other DNA
ccatctttgtcagcagtcac

SEQ ID NO: 156950 - DNA, 20 bp, synthetic construct
  source 1..20: mol_type = other DNA
accatctttgtcagcagtca

SEQ ID NO: 156951 - DNA, 20 bp, synthetic construct
  source 1..20: mol_type = other DNA
caccatctttgtcagcagtc

SEQ ID NO: 156952 - DNA, 20 bp, synthetic construct
  source 1..20: mol_type = other DNA
acaccatctttgtcagcagt

SEQ ID NO: 156953 - DNA, 20 bp, synthetic construct
  source 1..20: mol_type = other DNA
cacaccatctttgtcagcag

SEQ ID NO: 156954 - DNA, 20 bp, synthetic construct
  source 1..20: mol_type = other DNA
ccacaccatctttgtcagca

SEQ ID NO: 156955 - DNA, 20 bp, synthetic construct
  source 1..20: mol_type = other DNA
gccacaccatctttgtcagc

SEQ ID NO: 156956 - DNA, 20 bp, synthetic construct
  source 1..20: mol_type = other DNA
ggccacaccatctttgtcag

SEQ ID NO: 156957 - DNA, 20 bp, synthetic construct
  source 1..20: mol_type = other DNA
cggccacaccatctttgtca

SEQ ID NO: 156958 - DNA, 20 bp, synthetic construct
  source 1..20: mol_type = other DNA
tcggccacaccatctttgtc

SEQ ID NO: 156959 - DNA, 20 bp, synthetic construct
  source 1..20: mol_type = other DNA
atcggccacaccatctttgt

SEQ ID NO: 156960 - DNA, 20 bp, synthetic construct
  source 1..20: mol_type = other DNA
catcggccacaccatctttg

SEQ ID NO: 156961 - DNA, 20 bp, synthetic construct
  source 1..20: mol_type = other DNA
acatcggccacaccatcttt

SEQ ID NO: 156962 - DNA, 20 bp, synthetic construct
  source 1..20: mol_type = other DNA
cacatcggccacaccatctt

SEQ ID NO: 156963 - DNA, 20 bp, synthetic construct
  source 1..20: mol_type = other DNA
acacatcggccacaccatct

SEQ ID NO: 156964 - DNA, 20 bp, synthetic construct
  source 1..20: mol_type = other DNA
gacacatcggccacaccatc

SEQ ID NO: 156965 - DNA, 20 bp, synthetic construct
  source 1..20: mol_type = other DNA
agacacatcggccacaccat

SEQ ID NO: 156966 - DNA, 20 bp, synthetic construct
  source 1..20: mol_type = other DNA
tagacacatcggccacacca

SEQ ID NO: 156967 - DNA, 20 bp, synthetic construct
  source 1..20: mol_type = other DNA
atagacacatcggccacacc

SEQ ID NO: 156968 - DNA, 20 bp, synthetic construct
  source 1..20: mol_type = other DNA
aatagacacatcggccacac

SEQ ID NO: 156969 - DNA, 20 bp, synthetic construct
  source 1..20: mol_type = other DNA
caatagacacatcggccaca

SEQ ID NO: 156970 - DNA, 20 bp, synthetic construct
  source 1..20: mol_type = other DNA
tcaatagacacatcggccac

SEQ ID NO: 156971 - DNA, 20 bp, synthetic construct
  source 1..20: mol_type = other DNA
ttcaatagacacatcggcca

SEQ ID NO: 156972 - DNA, 20 bp, synthetic construct
  source 1..20: mol_type = other DNA
cttcaatagacacatcggcc

SEQ ID NO: 156973 - DNA, 20 bp, synthetic construct
  source 1..20: mol_type = other DNA
tcttcaatagacacatcggc

SEQ ID NO: 156974 - DNA, 20 bp, synthetic construct
  source 1..20: mol_type = other DNA
atcttcaatagacacatcgg

SEQ ID NO: 156975 - DNA, 20 bp, synthetic construct
  source 1..20: mol_type = other DNA
aatcttcaatagacacatcg

SEQ ID NO: 156976 - DNA, 20 bp, synthetic construct
  source 1..20: mol_type = other DNA
gaatcttcaatagacacatc

SEQ ID NO: 156977 - DNA, 20 bp, synthetic construct
  source 1..20: mol_type = other DNA
agaatcttcaatagacacat

SEQ ID NO: 156978 - DNA, 20 bp, synthetic construct
  source 1..20: mol_type = other DNA
cagaatcttcaatagacaca

SEQ ID NO: 156979 - DNA, 20 bp, synthetic construct
  source 1..20: mol_type = other DNA
acagaatcttcaatagacac

SEQ ID NO: 156980 - DNA, 20 bp, synthetic construct
  source 1..20: mol_type = other DNA
cacagaatcttcaatagaca

SEQ ID NO: 156981 - DNA, 20 bp, synthetic construct
  source 1..20: mol_type = other DNA
tcacagaatcttcaatagac

SEQ ID NO: 156982 - DNA, 20 bp, synthetic construct
  source 1..20: mol_type = other DNA
atcacagaatcttcaataga

SEQ ID NO: 156983 - DNA, 20 bp, synthetic construct
  source 1..20: mol_type = other DNA
gatcacagaatcttcaatag

SEQ ID NO: 156984 - DNA, 20 bp, synthetic construct
  source 1..20: mol_type = other DNA
agatcacagaatcttcaata

SEQ ID NO: 156985 - DNA, 20 bp, synthetic construct
  source 1..20: mol_type = other DNA
gagatcacagaatcttcaat

SEQ ID NO: 156986 - DNA, 20 bp, synthetic construct
  source 1..20: mol_type = other DNA
tgagatcacagaatcttcaa

SEQ ID NO: 156987 - DNA, 20 bp, synthetic construct
  source 1..20: mol_type = other DNA
gtgagatcacagaatcttca

SEQ ID NO: 156988 - DNA, 20 bp, synthetic construct
  source 1..20: mol_type = other DNA
agtgagatcacagaatcttc

SEQ ID NO: 156989 - DNA, 20 bp, synthetic construct
  source 1..20: mol_type = other DNA
gagtgagatcacagaatctt

SEQ ID NO: 156990 - DNA, 20 bp, synthetic construct
  source 1..20: mol_type = other DNA
agagtgagatcacagaatct

SEQ ID NO: 156991 - DNA, 20 bp, synthetic construct
  source 1..20: mol_type = other DNA
gagagtgagatcacagaatc

SEQ ID NO: 156992 - DNA, 20 bp, synthetic construct
  source 1..20: mol_type = other DNA
tgagagtgagatcacagaat

SEQ ID NO: 156993 - DNA, 20 bp, synthetic construct
  source 1..20: mol_type = other DNA
ctgagagtgagatcacagaa

SEQ ID NO: 156994 - DNA, 20 bp, synthetic construct
  source 1..20: mol_type = other DNA
cctgagagtgagatcacaga

SEQ ID NO: 156995 - DNA, 20 bp, synthetic construct
  source 1..20: mol_type = other DNA
tcctgagagtgagatcacag

SEQ ID NO: 156996 - DNA, 20 bp, synthetic construct
  source 1..20: mol_type = other DNA
ctcctgagagtgagatcaca

SEQ ID NO: 156997 - DNA, 20 bp, synthetic construct
  source 1..20: mol_type = other DNA
tctcctgagagtgagatcac

SEQ ID NO: 156998 - DNA, 20 bp, synthetic construct
  source 1..20: mol_type = other DNA
gtctcctgagagtgagatca

SEQ ID NO: 156999 - DNA, 20 bp, synthetic construct
  source 1..20: mol_type = other DNA
ggtctcctgagagtgagatc

SEQ ID NO: 157000 - DNA, 20 bp, synthetic construct
  source 1..20: mol_type = other DNA
tggtctcctgagagtgagat

SEQ ID NO: 157001 - DNA, 20 bp, synthetic construct
  source 1..20: mol_type = other DNA
atggtctcctgagagtgaga

SEQ ID NO: 157002 - DNA, 20 bp, synthetic construct
  source 1..20: mol_type = other DNA
aatggtctcctgagagtgag

SEQ ID NO: 157003 - DNA, 20 bp, synthetic construct
  source 1..20: mol_type = other DNA
caatggtctcctgagagtga

SEQ ID NO: 157004 - DNA, 20 bp, synthetic construct
  source 1..20: mol_type = other DNA
gcaatggtctcctgagagtg

SEQ ID NO: 157005 - DNA, 20 bp, synthetic construct
  source 1..20: mol_type = other DNA
tgcaatggtctcctgagagt

SEQ ID NO: 157006 - DNA, 20 bp, synthetic construct
  source 1..20: mol_type = other DNA
atgcaatggtctcctgagag

SEQ ID NO: 157007 - DNA, 20 bp, synthetic construct
  source 1..20: mol_type = other DNA
gatgcaatggtctcctgaga

SEQ ID NO: 157008 - DNA, 20 bp, synthetic construct
  source 1..20: mol_type = other DNA
tgatgcaatggtctcctgag

SEQ ID NO: 157009 - DNA, 20 bp, synthetic construct
  source 1..20: mol_type = other DNA
atgatgcaatggtctcctga

SEQ ID NO: 157010 - DNA, 20 bp, synthetic construct
  source 1..20: mol_type = other DNA
aatgatgcaatggtctcctg

SEQ ID NO: 157011 - DNA, 20 bp, synthetic construct
  source 1..20: mol_type = other DNA
caatgatgcaatggtctcct

SEQ ID NO: 157012 - DNA, 20 bp, synthetic construct
  source 1..20: mol_type = other DNA
ccaatgatgcaatggtctcc

SEQ ID NO: 157013 - DNA, 20 bp, synthetic construct
  source 1..20: mol_type = other DNA
gccaatgatgcaatggtctc

SEQ ID NO: 157014 - DNA, 20 bp, synthetic construct
  source 1..20: mol_type = other DNA
ggccaatgatgcaatggtct

SEQ ID NO: 157015 - DNA, 20 bp, synthetic construct
  source 1..20: mol_type = other DNA
cggccaatgatgcaatggtc

SEQ ID NO: 157016 - DNA, 20 bp, synthetic construct
  source 1..20: mol_type = other DNA
gcggccaatgatgcaatggt

SEQ ID NO: 157017 - DNA, 20 bp, synthetic construct
  source 1..20: mol_type = other DNA
tgcggccaatgatgcaatgg

SEQ ID NO: 157018 - DNA, 20 bp, synthetic construct
  source 1..20: mol_type = other DNA
gtgcggccaatgatgcaatg

SEQ ID NO: 157019 - DNA, 20 bp, synthetic construct
  source 1..20: mol_type = other DNA
tgtgcggccaatgatgcaat

SEQ ID NO: 157020 - DNA, 20 bp, synthetic construct
  source 1..20: mol_type = other DNA
gtgtgcggccaatgatgcaa

SEQ ID NO: 157021 - DNA, 20 bp, synthetic construct
  source 1..20: mol_type = other DNA
agtgtgcggccaatgatgca

SEQ ID NO: 157022 - DNA, 20 bp, synthetic construct
  source 1..20: mol_type = other DNA
cagtgtgcggccaatgatgc

SEQ ID NO: 157023 - DNA, 20 bp, synthetic construct
  source 1..20: mol_type = other DNA
ccagtgtgcggccaatgatg

SEQ ID NO: 157024 - DNA, 20 bp, synthetic construct
  source 1..20: mol_type = other DNA
accagtgtgcggccaatgat

SEQ ID NO: 157025 - DNA, 20 bp, synthetic construct
  source 1..20: mol_type = other DNA
caccagtgtgcggccaatga

SEQ ID NO: 157026 - DNA, 20 bp, synthetic construct
  source 1..20: mol_type = other DNA
ccaccagtgtgcggccaatg

SEQ ID NO: 157027 - DNA, 20 bp, synthetic construct
  source 1..20: mol_type = other DNA
accaccagtgtgcggccaat

SEQ ID NO: 157028 - DNA, 20 bp, synthetic construct
  source 1..20: mol_type = other DNA
taccaccagtgtgcggccaa

SEQ ID NO: 157029 - DNA, 20 bp, synthetic construct
  source 1..20: mol_type = other DNA
ttaccaccagtgtgcggcca

SEQ ID NO: 157030 - DNA, 20 bp, synthetic construct
  source 1..20: mol_type = other DNA
cttaccaccagtgtgcggcc

SEQ ID NO: 157031 - DNA, 20 bp, synthetic construct
  source 1..20: mol_type = other DNA
acttaccaccagtgtgcggc

SEQ ID NO: 157032 - DNA, 20 bp, synthetic construct
  source 1..20: mol_type = other DNA
aacttaccaccagtgtgcgg

SEQ ID NO: 157033 - DNA, 20 bp, synthetic construct
  source 1..20: mol_type = other DNA
aaacttaccaccagtgtgcg

SEQ ID NO: 157034 - DNA, 20 bp, synthetic construct
  source 1..20: mol_type = other DNA
aaaacttaccaccagtgtgc

SEQ ID NO: 157035 - DNA, 20 bp, synthetic construct
  source 1..20: mol_type = other DNA
gaaaacttaccaccagtgtg

SEQ ID NO: 157036 - DNA, 20 bp, synthetic construct
  source 1..20: mol_type = other DNA
tgaaaacttaccaccagtgt

SEQ ID NO: 157037 - DNA, 20 bp, synthetic construct
  source 1..20: mol_type = other DNA
atgaaaacttaccaccagtg

SEQ ID NO: 157038 - DNA, 20 bp, synthetic construct
  source 1..20: mol_type = other DNA
tatgaaaacttaccaccagt

SEQ ID NO: 157039 - DNA, 20 bp, synthetic construct
  source 1..20: mol_type = other DNA
ttatgaaaacttaccaccag

SEQ ID NO: 157040 - DNA, 20 bp, synthetic construct
  source 1..20: mol_type = other DNA
tttatgaaaacttaccacca

SEQ ID NO: 157041 - DNA, 20 bp, synthetic construct
  source 1..20: mol_type = other DNA
ttttatgaaaacttaccacc

SEQ ID NO: 157042 - DNA, 20 bp, synthetic construct
  source 1..20: mol_type = other DNA
cttttatgaaaacttaccac

SEQ ID NO: 157043 - DNA, 20 bp, synthetic construct
  source 1..20: mol_type = other DNA
ccttttatgaaaacttacca

SEQ ID NO: 157044 - DNA, 20 bp, synthetic construct
  source 1..20: mol_type = other DNA
tccttttatgaaaacttacc

SEQ ID NO: 157045 - DNA, 20 bp, synthetic construct
  source 1..20: mol_type = other DNA
atccttttatgaaaacttac

SEQ ID NO: 157046 - DNA, 20 bp, synthetic construct
  source 1..20: mol_type = other DNA
tatccttttatgaaaactta

SEQ ID NO: 157047 - DNA, 20 bp, synthetic construct
  source 1..20: mol_type = other DNA
atatccttttatgaaaactt

SEQ ID NO: 157048 - DNA, 20 bp, synthetic construct
  source 1..20: mol_type = other DNA
catatccttttatgaaaact

SEQ ID NO: 157049 - DNA, 20 bp, synthetic construct
  source 1..20: mol_type = other DNA
gcatatccttttatgaaaac

SEQ ID NO: 157050 - DNA, 20 bp, synthetic construct
  source 1..20: mol_type = other DNA
tgcatatccttttatgaaaa

SEQ ID NO: 157051 - DNA, 20 bp, synthetic construct
  source 1..20: mol_type = other DNA
atgcatatccttttatgaaa

SEQ ID NO: 157052 - DNA, 20 bp, synthetic construct
  source 1..20: mol_type = other DNA
tatgcatatccttttatgaa

SEQ ID NO: 157053 - DNA, 20 bp, synthetic construct
  source 1..20: mol_type = other DNA
ttatgcatatccttttatga

SEQ ID NO: 157054 - DNA, 20 bp, synthetic construct
  source 1..20: mol_type = other DNA
tttatgcatatccttttatg

SEQ ID NO: 157055 - DNA, 20 bp, synthetic construct
  source 1..20: mol_type = other DNA
ttttatgcatatccttttat

SEQ ID NO: 157056 - DNA, 20 bp, synthetic construct
  source 1..20: mol_type = other DNA
gttttatgcatatcctttta

SEQ ID NO: 157057 - DNA, 20 bp, synthetic construct
  source 1..20: mol_type = other DNA
agttttatgcatatcctttt

SEQ ID NO: 157058 - DNA, 20 bp, synthetic construct
  source 1..20: mol_type = other DNA
aagttttatgcatatccttt

SEQ ID NO: 157059 - DNA, 20 bp, synthetic construct
  source 1..20: mol_type = other DNA
gaagttttatgcatatcctt

SEQ ID NO: 157060 - DNA, 20 bp, synthetic construct
  source 1..20: mol_type = other DNA
agaagttttatgcatatcct

SEQ ID NO: 157061 - DNA, 20 bp, synthetic construct
  source 1..20: mol_type = other DNA
aagaagttttatgcatatcc

SEQ ID NO: 157062 - DNA, 20 bp, synthetic construct
  source 1..20: mol_type = other DNA
gaagaagttttatgcatatc

SEQ ID NO: 157063 - DNA, 20 bp, synthetic construct
  source 1..20: mol_type = other DNA
agaagaagttttatgcatat

SEQ ID NO: 157064 - DNA, 20 bp, synthetic construct
  source 1..20: mol_type = other DNA
tagaagaagttttatgcata

SEQ ID NO: 157065 - DNA, 20 bp, synthetic construct
  source 1..20: mol_type = other DNA
ttagaagaagttttatgcat

SEQ ID NO: 157066 - DNA, 20 bp, synthetic construct
  source 1..20: mol_type = other DNA
gttagaagaagttttatgca

SEQ ID NO: 157067 - DNA, 20 bp, synthetic construct
  source 1..20: mol_type = other DNA
tgttagaagaagttttatgc

SEQ ID NO: 157068 - DNA, 20 bp, synthetic construct
  source 1..20: mol_type = other DNA
atgttagaagaagttttatg

SEQ ID NO: 157069 - DNA, 20 bp, synthetic construct
  source 1..20: mol_type = other DNA
tatgttagaagaagttttat

SEQ ID NO: 157070 - DNA, 20 bp, synthetic construct
  source 1..20: mol_type = other DNA
gtatgttagaagaagtttta

SEQ ID NO: 157071 - DNA, 20 bp, synthetic construct
  source 1..20: mol_type = other DNA
tgtatgttagaagaagtttt

SEQ ID NO: 157072 - DNA, 20 bp, synthetic construct
  source 1..20: mol_type = other DNA
ctgtatgttagaagaagttt

SEQ ID NO: 157073 - DNA, 20 bp, synthetic construct
  source 1..20: mol_type = other DNA
actgtatgttagaagaagtt

SEQ ID NO: 157074 - DNA, 20 bp, synthetic construct
  source 1..20: mol_type = other DNA
gactgtatgttagaagaagt

SEQ ID NO: 157075 - DNA, 20 bp, synthetic construct
  source 1..20: mol_type = other DNA
tgactgtatgttagaagaag

SEQ ID NO: 157076 - DNA, 20 bp, synthetic construct
  source 1..20: mol_type = other DNA
atgactgtatgttagaagaa

SEQ ID NO: 157077 - DNA, 20 bp, synthetic construct
  source 1..20: mol_type = other DNA
catgactgtatgttagaaga

SEQ ID NO: 157078 - DNA, 20 bp, synthetic construct
  source 1..20: mol_type = other DNA
acatgactgtatgttagaag

SEQ ID NO: 157079 - DNA, 20 bp, synthetic construct
  source 1..20: mol_type = other DNA
tacatgactgtatgttagaa

SEQ ID NO: 157080 - DNA, 20 bp, synthetic construct
  source 1..20: mol_type = other DNA
atacatgactgtatgttaga

SEQ ID NO: 157081 - DNA, 20 bp, synthetic construct
  source 1..20: mol_type = other DNA
gatacatgactgtatgttag

SEQ ID NO: 157082 - DNA, 20 bp, synthetic construct
  source 1..20: mol_type = other DNA
agatacatgactgtatgtta

SEQ ID NO: 157083 - DNA, 20 bp, synthetic construct
  source 1..20: mol_type = other DNA
aagatacatgactgtatgtt

SEQ ID NO: 157084 - DNA, 20 bp, synthetic construct
  source 1..20: mol_type = other DNA
aaagatacatgactgtatgt

SEQ ID NO: 157085 - DNA, 20 bp, synthetic construct
  source 1..20: mol_type = other DNA
aaaagatacatgactgtatg

SEQ ID NO: 157086 - DNA, 20 bp, synthetic construct
  source 1..20: mol_type = other DNA
gaaaagatacatgactgtat

SEQ ID NO: 157087 - DNA, 20 bp, synthetic construct
  source 1..20: mol_type = other DNA
tgaaaagatacatgactgta

SEQ ID NO: 157088 - DNA, 20 bp, synthetic construct
  source 1..20: mol_type = other DNA
gtgaaaagatacatgactgt

SEQ ID NO: 157089 - DNA, 20 bp, synthetic construct
  source 1..20: mol_type = other DNA
agtgaaaagatacatgactg

SEQ ID NO: 157090 - DNA, 20 bp, synthetic construct
  source 1..20: mol_type = other DNA
aagtgaaaagatacatgact

SEQ ID NO: 157091 - DNA, 20 bp, synthetic construct
  source 1..20: mol_type = other DNA
aaagtgaaaagatacatgac

SEQ ID NO: 157092 - DNA, 20 bp, synthetic construct
  source 1..20: mol_type = other DNA
caaagtgaaaagatacatga

SEQ ID NO: 157093 - DNA, 20 bp, synthetic construct
  source 1..20: mol_type = other DNA
tcaaagtgaaaagatacatg

SEQ ID NO: 157094 - DNA, 20 bp, synthetic construct
  source 1..20: mol_type = other DNA
atcaaagtgaaaagatacat

SEQ ID NO: 157095 - DNA, 20 bp, synthetic construct
  source 1..20: mol_type = other DNA
aatcaaagtgaaaagataca

SEQ ID NO: 157096 - DNA, 20 bp, synthetic construct
  source 1..20: mol_type = other DNA
caatcaaagtgaaaagatac

SEQ ID NO: 157097 - DNA, 20 bp, synthetic construct
  source 1..20: mol_type = other DNA
acaatcaaagtgaaaagata

SEQ ID NO: 157098 - DNA, 20 bp, synthetic construct
  source 1..20: mol_type = other DNA
aacaatcaaagtgaaaagat

SEQ ID NO: 157099 - DNA, 20 bp, synthetic construct
  source 1..20: mol_type = other DNA
taacaatcaaagtgaaaaga

SEQ ID NO: 157100 - DNA, 20 bp, synthetic construct
  source 1..20: mol_type = other DNA
ctaacaatcaaagtgaaaag

SEQ ID NO: 157101 - DNA, 20 bp, synthetic construct
  source 1..20: mol_type = other DNA
actaacaatcaaagtgaaaa

SEQ ID NO: 157102 - DNA, 20 bp, synthetic construct
  source 1..20: mol_type = other DNA
gactaacaatcaaagtgaaa

SEQ ID NO: 157103 - DNA, 20 bp, synthetic construct
  source 1..20: mol_type = other DNA
cgactaacaatcaaagtgaa

SEQ ID NO: 157104 - DNA, 20 bp, synthetic construct
  source 1..20: mol_type = other DNA
gcgactaacaatcaaagtga

SEQ ID NO: 157105 - DNA, 20 bp, synthetic construct
  source 1..20: mol_type = other DNA
cgcgactaacaatcaaagtg

SEQ ID NO: 157106 - DNA, 20 bp, synthetic construct
  source 1..20: mol_type = other DNA
ccgcgactaacaatcaaagt

SEQ ID NO: 157107 - DNA, 20 bp, synthetic construct
  source 1..20: mol_type = other DNA
accgcgactaacaatcaaag

SEQ ID NO: 157108 - DNA, 20 bp, synthetic construct
  source 1..20: mol_type = other DNA
aaccgcgactaacaatcaaa

SEQ ID NO: 157109 - DNA, 20 bp, synthetic construct
  source 1..20: mol_type = other DNA
aaaccgcgactaacaatcaa

SEQ ID NO: 157110 - DNA, 20 bp, synthetic construct
  source 1..20: mol_type = other DNA
gaaaccgcgactaacaatca

SEQ ID NO: 157111 - DNA, 20 bp, synthetic construct
  source 1..20: mol_type = other DNA
agaaaccgcgactaacaatc

SEQ ID NO: 157112 - DNA, 20 bp, synthetic construct
  source 1..20: mol_type = other DNA
tagaaaccgcgactaacaat

SEQ ID NO: 157113 - DNA, 20 bp, synthetic construct
  source 1..20: mol_type = other DNA
ttagaaaccgcgactaacaa

SEQ ID NO: 157114 - DNA, 20 bp, synthetic construct
  source 1..20: mol_type = other DNA
tttagaaaccgcgactaaca

SEQ ID NO: 157115 - DNA, 20 bp, synthetic construct
  source 1..20: mol_type = other DNA
ctttagaaaccgcgactaac

SEQ ID NO: 157116 - DNA, 20 bp, synthetic construct
  source 1..20: mol_type = other DNA
tctttagaaaccgcgactaa

SEQ ID NO: 157117 - DNA, 20 bp, synthetic construct
  source 1..20: mol_type = other DNA
atctttagaaaccgcgacta

SEQ ID NO: 157118 - DNA, 20 bp, synthetic construct
  source 1..20: mol_type = other DNA
gatctttagaaaccgcgact

SEQ ID NO: 157119 - DNA, 20 bp, synthetic construct
  source 1..20: mol_type = other DNA
ggatctttagaaaccgcgac

SEQ ID NO: 157120 - DNA, 20 bp, synthetic construct
  source 1..20: mol_type = other DNA
tggatctttagaaaccgcga

SEQ ID NO: 157121 - DNA, 20 bp, synthetic construct
  source 1..20: mol_type = other DNA
ctggatctttagaaaccgcg

SEQ ID NO: 157122 - DNA, 20 bp, synthetic construct
  source 1..20: mol_type = other DNA
tctggatctttagaaaccgc

SEQ ID NO: 157123 - DNA, 20 bp, synthetic construct
  source 1..20: mol_type = other DNA
atctggatctttagaaaccg

SEQ ID NO: 157124 - DNA, 20 bp, synthetic construct
  source 1..20: mol_type = other DNA
tatctggatctttagaaacc

SEQ ID NO: 157125 - DNA, 20 bp, synthetic construct
  source 1..20: mol_type = other DNA
ttatctggatctttagaaac

SEQ ID NO: 157126 - DNA, 20 bp, synthetic construct
  source 1..20: mol_type = other DNA
tttatctggatctttagaaa

SEQ ID NO: 157127 - DNA, 20 bp, synthetic construct
  source 1..20: mol_type = other DNA
gtttatctggatctttagaa

SEQ ID NO: 157128 - DNA, 20 bp, synthetic construct
  source 1..20: mol_type = other DNA
agtttatctggatctttaga

SEQ ID NO: 157129 - DNA, 20 bp, synthetic construct
  source 1..20: mol_type = other DNA
cagtttatctggatctttag

SEQ ID NO: 157130 - DNA, 20 bp, synthetic construct
  source 1..20: mol_type = other DNA
acagtttatctggatcttta

SEQ ID NO: 157131 - DNA, 20 bp, synthetic construct
  source 1..20: mol_type = other DNA
tacagtttatctggatcttt

SEQ ID NO: 157132 - DNA, 20 bp, synthetic construct
  source 1..20: mol_type = other DNA
gtacagtttatctggatctt

SEQ ID NO: 157133 - DNA, 20 bp, synthetic construct
  source 1..20: mol_type = other DNA
agtacagtttatctggatct

SEQ ID NO: 157134 - DNA, 20 bp, synthetic construct
  source 1..20: mol_type = other DNA
aagtacagtttatctggatc

SEQ ID NO: 157135 - DNA, 20 bp, synthetic construct
  source 1..20: mol_type = other DNA
caagtacagtttatctggat

SEQ ID NO: 157136 - DNA, 20 bp, synthetic construct
  source 1..20: mol_type = other DNA
gcaagtacagtttatctgga

SEQ ID NO: 157137 - DNA, 20 bp, synthetic construct
  source 1..20: mol_type = other DNA
tgcaagtacagtttatctgg

SEQ ID NO: 157138 - DNA, 20 bp, synthetic construct
  source 1..20: mol_type = other DNA
ctgcaagtacagtttatctg

SEQ ID NO: 157139 - DNA, 20 bp, synthetic construct
  source 1..20: mol_type = other DNA
actgcaagtacagtttatct

SEQ ID NO: 157140 - DNA, 20 bp, synthetic construct
  source 1..20: mol_type = other DNA
aactgcaagtacagtttatc

SEQ ID NO: 157141 - DNA, 20 bp, synthetic construct
  source 1..20: mol_type = other DNA
gaactgcaagtacagtttat

SEQ ID NO: 157142 - DNA, 20 bp, synthetic construct
  source 1..20: mol_type = other DNA
tgaactgcaagtacagttta

SEQ ID NO: 157143 - DNA, 20 bp, synthetic construct
  source 1..20: mol_type = other DNA
ttgaactgcaagtacagttt

SEQ ID NO: 157144 - DNA, 20 bp, synthetic construct
  source 1..20: mol_type = other DNA
tttgaactgcaagtacagtt

SEQ ID NO: 157145 - DNA, 20 bp, synthetic construct
  source 1..20: mol_type = other DNA
atttgaactgcaagtacagt

SEQ ID NO: 157146 - DNA, 20 bp, synthetic construct
  source 1..20: mol_type = other DNA
aatttgaactgcaagtacag

SEQ ID NO: 157147 - DNA, 20 bp, synthetic construct
  source 1..20: mol_type = other DNA
taatttgaactgcaagtaca

SEQ ID NO: 157148 - DNA, 20 bp, synthetic construct
  source 1..20: mol_type = other DNA
ctaatttgaactgcaagtac

SEQ ID NO: 157149 - DNA, 20 bp, synthetic construct
  source 1..20: mol_type = other DNA
cctaatttgaactgcaagta

SEQ ID NO: 157150 - DNA, 20 bp, synthetic construct
  source 1..20: mol_type = other DNA
tcctaatttgaactgcaagt

SEQ ID NO: 157151 - DNA, 20 bp, synthetic construct
  source 1..20: mol_type = other DNA
ttcctaatttgaactgcaag

SEQ ID NO: 157152 - DNA, 20 bp, synthetic construct
  source 1..20: mol_type = other DNA
tttcctaatttgaactgcaa

SEQ ID NO: 157153 - DNA, 20 bp, synthetic construct
  source 1..20: mol_type = other DNA
ttttcctaatttgaactgca

SEQ ID NO: 157154 - DNA, 20 bp, synthetic construct
  source 1..20: mol_type = other DNA
cttttcctaatttgaactgc

SEQ ID NO: 157155 - DNA, 20 bp, synthetic construct
  source 1..20: mol_type = other DNA
gcttttcctaatttgaactg

SEQ ID NO: 157156 - DNA, 20 bp, synthetic construct
  source 1..20: mol_type = other DNA
tgcttttcctaatttgaact

SEQ ID NO: 157157 - DNA, 20 bp, synthetic construct
  source 1..20: mol_type = other DNA
ttgcttttcctaatttgaac

SEQ ID NO: 157158 - DNA, 20 bp, synthetic construct
  source 1..20: mol_type = other DNA
attgcttttcctaatttgaa

SEQ ID NO: 157159 - DNA, 20 bp, synthetic construct
  source 1..20: mol_type = other DNA
aattgcttttcctaatttga

SEQ ID NO: 157160 - DNA, 20 bp, synthetic construct
  source 1..20: mol_type = other DNA
aaattgcttttcctaatttg

SEQ ID NO: 157161 - DNA, 20 bp, synthetic construct
  source 1..20: mol_type = other DNA
aaaattgcttttcctaattt

SEQ ID NO: 157162 - DNA, 20 bp, synthetic construct
  source 1..20: mol_type = other DNA
taaaattgcttttcctaatt

SEQ ID NO: 157163 - DNA, 20 bp, synthetic construct
  source 1..20: mol_type = other DNA
ataaaattgcttttcctaat

SEQ ID NO: 157164 - DNA, 20 bp, synthetic construct
  source 1..20: mol_type = other DNA
aataaaattgcttttcctaa

SEQ ID NO: 157165 - DNA, 20 bp, synthetic construct
  source 1..20: mol_type = other DNA
caataaaattgcttttccta

SEQ ID NO: 157166 - DNA, 20 bp, synthetic construct
  source 1..20: mol_type = other DNA
ccaataaaattgcttttcct

SEQ ID NO: 157167 - DNA, 20 bp, synthetic construct
  source 1..20: mol_type = other DNA
tccaataaaattgcttttcc

SEQ ID NO: 157168 - DNA, 20 bp, synthetic construct
  source 1..20: mol_type = other DNA
gtccaataaaattgcttttc

SEQ ID NO: 157169 - DNA, 20 bp, synthetic construct
  source 1..20: mol_type = other DNA
tgtccaataaaattgctttt

SEQ ID NO: 157170 - DNA, 20 bp, synthetic construct
  source 1..20: mol_type = other DNA
ttgtccaataaaattgcttt

SEQ ID NO: 157171 - DNA, 20 bp, synthetic construct
  source 1..20: mol_type = other DNA
attgtccaataaaattgctt

SEQ ID NO: 157172 - DNA, 20 bp, synthetic construct
  source 1..20: mol_type = other DNA
aattgtccaataaaattgct

SEQ ID NO: 157173 - DNA, 20 bp, synthetic construct
  source 1..20: mol_type = other DNA
taattgtccaataaaattgc

SEQ ID NO: 157174 - DNA, 20 bp, synthetic construct
  source 1..20: mol_type = other DNA
gtaattgtccaataaaattg

SEQ ID NO: 157175 - DNA, 20 bp, synthetic construct
  source 1..20: mol_type = other DNA
cgtaattgtccaataaaatt

SEQ ID NO: 157176 - DNA, 20 bp, synthetic construct
  source 1..20: mol_type = other DNA
ccgtaattgtccaataaaat

SEQ ID NO: 157177 - DNA, 20 bp, synthetic construct
  source 1..20: mol_type = other DNA
accgtaattgtccaataaaa

SEQ ID NO: 157178 - DNA, 20 bp, synthetic construct
  source 1..20: mol_type = other DNA
caccgtaattgtccaataaa

SEQ ID NO: 157179 - DNA, 20 bp, synthetic construct
  source 1..20: mol_type = other DNA
tcaccgtaattgtccaataa

SEQ ID NO: 157180 - DNA, 20 bp, synthetic construct
  source 1..20: mol_type = other DNA
ttcaccgtaattgtccaata

SEQ ID NO: 157181 - DNA, 20 bp, synthetic construct
  source 1..20: mol_type = other DNA
tttcaccgtaattgtccaat

SEQ ID NO: 157182 - DNA, 20 bp, synthetic construct
  source 1..20: mol_type = other DNA
ttttcaccgtaattgtccaa

SEQ ID NO: 157183 - DNA, 20 bp, synthetic construct
  source 1..20: mol_type = other DNA
attttcaccgtaattgtcca

SEQ ID NO: 157184 - DNA, 20 bp, synthetic construct
  source 1..20: mol_type = other DNA
cattttcaccgtaattgtcc

SEQ ID NO: 157185 - DNA, 20 bp, synthetic construct
  source 1..20: mol_type = other DNA
tcattttcaccgtaattgtc

SEQ ID NO: 157186 - DNA, 20 bp, synthetic construct
  source 1..20: mol_type = other DNA
ttcattttcaccgtaattgt

SEQ ID NO: 157187 - DNA, 20 bp, synthetic construct
  source 1..20: mol_type = other DNA
attcattttcaccgtaattg

SEQ ID NO: 157188 - DNA, 20 bp, synthetic construct
  source 1..20: mol_type = other DNA
aattcattttcaccgtaatt

SEQ ID NO: 157189 - DNA, 20 bp, synthetic construct
  source 1..20: mol_type = other DNA
taattcattttcaccgtaat

SEQ ID NO: 157190 - DNA, 20 bp, synthetic construct
  source 1..20: mol_type = other DNA
ataattcattttcaccgtaa

SEQ ID NO: 157191 - DNA, 20 bp, synthetic construct
  source 1..20: mol_type = other DNA
aataattcattttcaccgta

SEQ ID NO: 157192 - DNA, 20 bp, synthetic construct
  source 1..20: mol_type = other DNA
aaataattcattttcaccgt

SEQ ID NO: 157193 - DNA, 20 bp, synthetic construct
  source 1..20: mol_type = other DNA
aaaataattcattttcaccg

SEQ ID NO: 157194 - DNA, 20 bp, synthetic construct
  source 1..20: mol_type = other DNA
taaaataattcattttcacc

SEQ ID NO: 157195 - DNA, 20 bp, synthetic construct
  source 1..20: mol_type = other DNA
ataaaataattcattttcac

SEQ ID NO: 157196 - DNA, 20 bp, synthetic construct
  source 1..20: mol_type = other DNA
gataaaataattcattttca

SEQ ID NO: 157197 - DNA, 20 bp, synthetic construct
  source 1..20: mol_type = other DNA
agataaaataattcattttc

SEQ ID NO: 157198 - DNA, 20 bp, synthetic construct
  source 1..20: mol_type = other DNA
tagataaaataattcatttt

SEQ ID NO: 157199 - DNA, 20 bp, synthetic construct
  source 1..20: mol_type = other DNA
ctagataaaataattcattt

SEQ ID NO: 157200 - DNA, 20 bp, synthetic construct
  source 1..20: mol_type = other DNA
cctagataaaataattcatt

SEQ ID NO: 157201 - DNA, 20 bp, synthetic construct
  source 1..20: mol_type = other DNA
acctagataaaataattcat

SEQ ID NO: 157202 - DNA, 20 bp, synthetic construct
  source 1..20: mol_type = other DNA
gacctagataaaataattca

SEQ ID NO: 157203 - DNA, 20 bp, synthetic construct
  source 1..20: mol_type = other DNA
tgacctagataaaataattc

SEQ ID NO: 157204 - DNA, 20 bp, synthetic construct
  source 1..20: mol_type = other DNA
ctgacctagataaaataatt

SEQ ID NO: 157205 - DNA, 20 bp, synthetic construct
  source 1..20: mol_type = other DNA
actgacctagataaaataat

SEQ ID NO: 157206 - DNA, 20 bp, synthetic construct
  source 1..20: mol_type = other DNA
aactgacctagataaaataa

SEQ ID NO: 157207 - DNA, 20 bp, synthetic construct
  source 1..20: mol_type = other DNA
taactgacctagataaaata

SEQ ID NO: 157208 - DNA, 20 bp, synthetic construct
  source 1..20: mol_type = other DNA
ttaactgacctagataaaat

SEQ ID NO: 157209 - DNA, 20 bp, synthetic construct
  source 1..20: mol_type = other DNA
cttaactgacctagataaaa

SEQ ID NO: 157210 - DNA, 20 bp, synthetic construct
  source 1..20: mol_type = other DNA
tcttaactgacctagataaa

SEQ ID NO: 157211 - DNA, 20 bp, synthetic construct
  source 1..20: mol_type = other DNA
ttcttaactgacctagataa

SEQ ID NO: 157212 - DNA, 20 bp, synthetic construct
  source 1..20: mol_type = other DNA
gttcttaactgacctagata

SEQ ID NO: 157213 - DNA, 20 bp, synthetic construct
  source 1..20: mol_type = other DNA
tgttcttaactgacctagat

SEQ ID NO: 157214 - DNA, 20 bp, synthetic construct
  source 1..20: mol_type = other DNA
gtgttcttaactgacctaga

SEQ ID NO: 157215 - DNA, 20 bp, synthetic construct
  source 1..20: mol_type = other DNA
agtgttcttaactgacctag

SEQ ID NO: 157216 - DNA, 20 bp, synthetic construct
  source 1..20: mol_type = other DNA
cagtgttcttaactgaccta

SEQ ID NO: 157217 - DNA, 20 bp, synthetic construct
  source 1..20: mol_type = other DNA
acagtgttcttaactgacct

SEQ ID NO: 157218 - DNA, 20 bp, synthetic construct
  source 1..20: mol_type = other DNA
aacagtgttcttaactgacc

SEQ ID NO: 157219 - DNA, 20 bp, synthetic construct
  source 1..20: mol_type = other DNA
gaacagtgttcttaactgac

SEQ ID NO: 157220 - DNA, 20 bp, synthetic construct
  source 1..20: mol_type = other DNA
agaacagtgttcttaactga

SEQ ID NO: 157221 - DNA, 20 bp, synthetic construct
  source 1..20: mol_type = other DNA
cagaacagtgttcttaactg

SEQ ID NO: 157222 - DNA, 20 bp, synthetic construct
  source 1..20: mol_type = other DNA
gcagaacagtgttcttaact

SEQ ID NO: 157223 - DNA, 20 bp, synthetic construct
  source 1..20: mol_type = other DNA
agcagaacagtgttcttaac

SEQ ID NO: 157224 - DNA, 20 bp, synthetic construct
  source 1..20: mol_type = other DNA
tagcagaacagtgttcttaa

SEQ ID NO: 157225 - DNA, 20 bp, synthetic construct
  source 1..20: mol_type = other DNA
ttagcagaacagtgttctta

SEQ ID NO: 157226 - DNA, 20 bp, synthetic construct
  source 1..20: mol_type = other DNA
cttagcagaacagtgttctt

SEQ ID NO: 157227 - DNA, 20 bp, synthetic construct
  source 1..20: mol_type = other DNA
tcttagcagaacagtgttct

SEQ ID NO: 157228 - DNA, 20 bp, synthetic construct
  source 1..20: mol_type = other DNA
atcttagcagaacagtgttc

SEQ ID NO: 157229 - DNA, 20 bp, synthetic construct
  source 1..20: mol_type = other DNA
catcttagcagaacagtgtt

SEQ ID NO: 157230 - DNA, 20 bp, synthetic construct
  source 1..20: mol_type = other DNA
gcatcttagcagaacagtgt

SEQ ID NO: 157231 - DNA, 20 bp, synthetic construct
  source 1..20: mol_type = other DNA
tgcatcttagcagaacagtg

SEQ ID NO: 157232 - DNA, 20 bp, synthetic construct
  source 1..20: mol_type = other DNA
ctgcatcttagcagaacagt

SEQ ID NO: 157233 - DNA, 20 bp, synthetic construct
  source 1..20: mol_type = other DNA
actgcatcttagcagaacag

SEQ ID NO: 157234 - DNA, 20 bp, synthetic construct
  source 1..20: mol_type = other DNA
tactgcatcttagcagaaca

SEQ ID NO: 157235 - DNA, 20 bp, synthetic construct
  source 1..20: mol_type = other DNA
ttactgcatcttagcagaac

SEQ ID NO: 157236 - DNA, 20 bp, synthetic construct
  source 1..20: mol_type = other DNA
tttactgcatcttagcagaa

SEQ ID NO: 157237 - DNA, 20 bp, synthetic construct
  source 1..20: mol_type = other DNA
ttttactgcatcttagcaga

SEQ ID NO: 157238 - DNA, 20 bp, synthetic construct
  source 1..20: mol_type = other DNA
tttttactgcatcttagcag

SEQ ID NO: 157239 - DNA, 20 bp, synthetic construct
  source 1..20: mol_type = other DNA
ctttttactgcatcttagca

SEQ ID NO: 157240 - DNA, 20 bp, synthetic construct
  source 1..20: mol_type = other DNA
gctttttactgcatcttagc

SEQ ID NO: 157241 - DNA, 20 bp, synthetic construct
  source 1..20: mol_type = other DNA
tgctttttactgcatcttag

SEQ ID NO: 157242 - DNA, 20 bp, synthetic construct
  source 1..20: mol_type = other DNA
ctgctttttactgcatctta

SEQ ID NO: 157243 - DNA, 20 bp, synthetic construct
  source 1..20: mol_type = other DNA
cctgctttttactgcatctt

SEQ ID NO: 157244 - DNA, 20 bp, synthetic construct
  source 1..20: mol_type = other DNA
acctgctttttactgcatct

SEQ ID NO: 157245 - DNA, 20 bp, synthetic construct
  source 1..20: mol_type = other DNA
aacctgctttttactgcatc

SEQ ID NO: 157246 - DNA, 20 bp, synthetic construct
  source 1..20: mol_type = other DNA
taacctgctttttactgcat

SEQ ID NO: 157247 - DNA, 20 bp, synthetic construct
  source 1..20: mol_type = other DNA
gtaacctgctttttactgca

SEQ ID NO: 157248 - DNA, 20 bp, synthetic construct
  source 1..20: mol_type = other DNA
tgtaacctgctttttactgc

SEQ ID NO: 157249 - DNA, 20 bp, synthetic construct
  source 1..20: mol_type = other DNA
atgtaacctgctttttactg

SEQ ID NO: 157250 - DNA, 20 bp, synthetic construct
  source 1..20: mol_type = other DNA
aatgtaacctgctttttact

SEQ ID NO: 157251 - DNA, 20 bp, synthetic construct
  source 1..20: mol_type = other DNA
aaatgtaacctgctttttac

SEQ ID NO: 157252 - DNA, 20 bp, synthetic construct
  source 1..20: mol_type = other DNA
caaatgtaacctgcttttta

SEQ ID NO: 157253 - DNA, 20 bp, synthetic construct
  source 1..20: mol_type = other DNA
tcaaatgtaacctgcttttt

SEQ ID NO: 157254 - DNA, 20 bp, synthetic construct
  source 1..20: mol_type = other DNA
gtcaaatgtaacctgctttt

SEQ ID NO: 157255 - DNA, 20 bp, synthetic construct
  source 1..20: mol_type = other DNA
ggtcaaatgtaacctgcttt

SEQ ID NO: 157256 - DNA, 20 bp, synthetic construct
  source 1..20: mol_type = other DNA
tggtcaaatgtaacctgctt

SEQ ID NO: 157257 - DNA, 20 bp, synthetic construct
  source 1..20: mol_type = other DNA
atggtcaaatgtaacctgct

SEQ ID NO: 157258 - DNA, 20 bp, synthetic construct
  source 1..20: mol_type = other DNA
tatggtcaaatgtaacctgc

SEQ ID NO: 157259 - DNA, 20 bp, synthetic construct
  source 1..20: mol_type = other DNA
atatggtcaaatgtaacctg

SEQ ID NO: 157260 - DNA, 20 bp, synthetic construct
  source 1..20: mol_type = other DNA
aatatggtcaaatgtaacct

SEQ ID NO: 157261 - DNA, 20 bp, synthetic construct
  source 1..20: mol_type = other DNA
taatatggtcaaatgtaacc

SEQ ID NO: 157262 - DNA, 20 bp, synthetic construct
  source 1..20: mol_type = other DNA
ctaatatggtcaaatgtaac

SEQ ID NO: 157263 - DNA, 20 bp, synthetic construct
  source 1..20: mol_type = other DNA
tctaatatggtcaaatgtaa

SEQ ID NO: 157264 - DNA, 20 bp, synthetic construct
  source 1..20: mol_type = other DNA
atctaatatggtcaaatgta

SEQ ID NO: 157265 - DNA, 20 bp, synthetic construct
  source 1..20: mol_type = other DNA
gatctaatatggtcaaatgt

SEQ ID NO: 157266 - DNA, 20 bp, synthetic construct
  source 1..20: mol_type = other DNA
agatctaatatggtcaaatg

SEQ ID NO: 157267 - DNA, 20 bp, synthetic construct
  source 1..20: mol_type = other DNA
cagatctaatatggtcaaat

SEQ ID NO: 157268 - DNA, 20 bp, synthetic construct
  source 1..20: mol_type = other DNA
tcagatctaatatggtcaaa

SEQ ID NO: 157269 - DNA, 20 bp, synthetic construct
  source 1..20: mol_type = other DNA
ctcagatctaatatggtcaa

SEQ ID NO: 157270 - DNA, 20 bp, synthetic construct
  source 1..20: mol_type = other DNA
actcagatctaatatggtca

SEQ ID NO: 157271 - DNA, 20 bp, synthetic construct
  source 1..20: mol_type = other DNA
aactcagatctaatatggtc

SEQ ID NO: 157272 - DNA, 20 bp, synthetic construct
  source 1..20: mol_type = other DNA
aaactcagatctaatatggt

SEQ ID NO: 157273 - DNA, 20 bp, synthetic construct
  source 1..20: mol_type = other DNA
caaactcagatctaatatgg

SEQ ID NO: 157274 - DNA, 20 bp, synthetic construct
  source 1..20: mol_type = other DNA
ccaaactcagatctaatatg

SEQ ID NO: 157275 - DNA, 20 bp, synthetic construct
  source 1..20: mol_type = other DNA
tccaaactcagatctaatat

SEQ ID NO: 157276 - DNA, 20 bp, synthetic construct
  source 1..20: mol_type = other DNA
ttccaaactcagatctaata

SEQ ID NO: 157277 - DNA, 20 bp, synthetic construct
  source 1..20: mol_type = other DNA
tttccaaactcagatctaat

SEQ ID NO: 157278 - DNA, 20 bp, synthetic construct
  source 1..20: mol_type = other DNA
ttttccaaactcagatctaa

SEQ ID NO: 157279 - DNA, 20 bp, synthetic construct
  source 1..20: mol_type = other DNA
gttttccaaactcagatcta

SEQ ID NO: 157280 - DNA, 20 bp, synthetic construct
  source 1..20: mol_type = other DNA
tgttttccaaactcagatct

SEQ ID NO: 157281 - DNA, 20 bp, synthetic construct
  source 1..20: mol_type = other DNA
ctgttttccaaactcagatc

SEQ ID NO: 157282 - DNA, 20 bp, synthetic construct
  source 1..20: mol_type = other DNA
tctgttttccaaactcagat

SEQ ID NO: 157283 - DNA, 20 bp, synthetic construct
  source 1..20: mol_type = other DNA
ttctgttttccaaactcaga

SEQ ID NO: 157284 - DNA, 20 bp, synthetic construct
  source 1..20: mol_type = other DNA
cttctgttttccaaactcag

SEQ ID NO: 157285 - DNA, 20 bp, synthetic construct
  source 1..20: mol_type = other DNA
acttctgttttccaaactca

SEQ ID NO: 157286 - DNA, 20 bp, synthetic construct
  source 1..20: mol_type = other DNA
tacttctgttttccaaactc

SEQ ID NO: 157287 - DNA, 20 bp, synthetic construct
  source 1..20: mol_type = other DNA
ctacttctgttttccaaact

SEQ ID NO: 157288 - DNA, 20 bp, synthetic construct
  source 1..20: mol_type = other DNA
actacttctgttttccaaac

SEQ ID NO: 157289 - DNA, 20 bp, synthetic construct
  source 1..20: mol_type = other DNA
gactacttctgttttccaaa

SEQ ID NO: 157290 - DNA, 20 bp, synthetic construct
  source 1..20: mol_type = other DNA
agactacttctgttttccaa

SEQ ID NO: 157291 - DNA, 20 bp, synthetic construct
  source 1..20: mol_type = other DNA
aagactacttctgttttcca

SEQ ID NO: 157292 - DNA, 20 bp, synthetic construct
  source 1..20: mol_type = other DNA
aaagactacttctgttttcc

SEQ ID NO: 157293 - DNA, 20 bp, synthetic construct
  source 1..20: mol_type = other DNA
taaagactacttctgttttc

SEQ ID NO: 157294 - DNA, 20 bp, synthetic construct
  source 1..20: mol_type = other DNA
ctaaagactacttctgtttt

SEQ ID NO: 157295 - DNA, 20 bp, synthetic construct
  source 1..20: mol_type = other DNA
actaaagactacttctgttt

SEQ ID NO: 157296 - DNA, 20 bp, synthetic construct
  source 1..20: mol_type = other DNA
aactaaagactacttctgtt

SEQ ID NO: 157297 - DNA, 20 bp, synthetic construct
  source 1..20: mol_type = other DNA
aaactaaagactacttctgt

SEQ ID NO: 157298 - DNA, 20 bp, synthetic construct
  source 1..20: mol_type = other DNA
aaaactaaagactacttctg

SEQ ID NO: 157299 - DNA, 20 bp, synthetic construct
  source 1..20: mol_type = other DNA
taaaactaaagactacttct

SEQ ID NO: 157300 - DNA, 20 bp, synthetic construct
  source 1..20: mol_type = other DNA
ttaaaactaaagactacttc

SEQ ID NO: 157301 - DNA, 20 bp, synthetic construct
  source 1..20: mol_type = other DNA
tttaaaactaaagactactt

SEQ ID NO: 157302 - DNA, 20 bp, synthetic construct
  source 1..20: mol_type = other DNA
ttttaaaactaaagactact

SEQ ID NO: 157303 - DNA, 20 bp, synthetic construct
  source 1..20: mol_type = other DNA
attttaaaactaaagactac

SEQ ID NO: 157304 - DNA, 20 bp, synthetic construct
  source 1..20: mol_type = other DNA
cattttaaaactaaagacta

SEQ ID NO: 157305 - DNA, 20 bp, synthetic construct
  source 1..20: mol_type = other DNA
ccattttaaaactaaagact

SEQ ID NO: 157306 - DNA, 20 bp, synthetic construct
  source 1..20: mol_type = other DNA
gccattttaaaactaaagac

SEQ ID NO: 157307 - DNA, 20 bp, synthetic construct
  source 1..20: mol_type = other DNA
ggccattttaaaactaaaga

SEQ ID NO: 157308 - DNA, 20 bp, synthetic construct
  source 1..20: mol_type = other DNA
tggccattttaaaactaaag

SEQ ID NO: 157309 - DNA, 20 bp, synthetic construct
  source 1..20: mol_type = other DNA
ctggccattttaaaactaaa

SEQ ID NO: 157310 - DNA, 20 bp, synthetic construct
  source 1..20: mol_type = other DNA
tctggccattttaaaactaa

SEQ ID NO: 157311 - DNA, 20 bp, synthetic construct
  source 1..20: mol_type = other DNA
atctggccattttaaaacta

SEQ ID NO: 157312 - DNA, 20 bp, synthetic construct
  source 1..20: mol_type = other DNA
aatctggccattttaaaact

SEQ ID NO: 157313 - DNA, 20 bp, synthetic construct
  source 1..20: mol_type = other DNA
aaatctggccattttaaaac

SEQ ID NO: 157314 - DNA, 20 bp, synthetic construct
  source 1..20: mol_type = other DNA
aaaatctggccattttaaaa

SEQ ID NO: 157315 - DNA, 20 bp, synthetic construct
  source 1..20: mol_type = other DNA
gaaaatctggccattttaaa

SEQ ID NO: 157316 - DNA, 20 bp, synthetic construct
  source 1..20: mol_type = other DNA
agaaaatctggccattttaa

SEQ ID NO: 157317 - DNA, 20 bp, synthetic construct
  source 1..20: mol_type = other DNA
aagaaaatctggccatttta

SEQ ID NO: 157318 - DNA, 20 bp, synthetic construct
  source 1..20: mol_type = other DNA
caagaaaatctggccatttt

SEQ ID NO: 157319 - DNA, 20 bp, synthetic construct
  source 1..20: mol_type = other DNA
gcaagaaaatctggccattt

SEQ ID NO: 157320 - DNA, 20 bp, synthetic construct
  source 1..20: mol_type = other DNA
ggcaagaaaatctggccatt

SEQ ID NO: 157321 - DNA, 20 bp, synthetic construct
  source 1..20: mol_type = other DNA
tggcaagaaaatctggccat

SEQ ID NO: 157322 - DNA, 20 bp, synthetic construct
  source 1..20: mol_type = other DNA
ctggcaagaaaatctggcca

SEQ ID NO: 157323 - DNA, 20 bp, synthetic construct
  source 1..20: mol_type = other DNA
cctggcaagaaaatctggcc

SEQ ID NO: 157324 - DNA, 20 bp, synthetic construct
  source 1..20: mol_type = other DNA
tcctggcaagaaaatctggc

SEQ ID NO: 157325 - DNA, 20 bp, synthetic construct
  source 1..20: mol_type = other DNA
atcctggcaagaaaatctgg

SEQ ID NO: 157326 - DNA, 20 bp, synthetic construct
  source 1..20: mol_type = other DNA
aatcctggcaagaaaatctg

SEQ ID NO: 157327 - DNA, 20 bp, synthetic construct
  source 1..20: mol_type = other DNA
caatcctggcaagaaaatct

SEQ ID NO: 157328 - DNA, 20 bp, synthetic construct
  source 1..20: mol_type = other DNA
ccaatcctggcaagaaaatc

SEQ ID NO: 157329 - DNA, 20 bp, synthetic construct
  source 1..20: mol_type = other DNA
cccaatcctggcaagaaaat

SEQ ID NO: 157330 - DNA, 20 bp, synthetic construct
  source 1..20: mol_type = other DNA
acccaatcctggcaagaaaa

SEQ ID NO: 157331 - DNA, 20 bp, synthetic construct
  source 1..20: mol_type = other DNA
aacccaatcctggcaagaaa

SEQ ID NO: 157332 - DNA, 20 bp, synthetic construct
  source 1..20: mol_type = other DNA
aaacccaatcctggcaagaa

SEQ ID NO: 157333 - DNA, 20 bp, synthetic construct
  source 1..20: mol_type = other DNA
gaaacccaatcctggcaaga

SEQ ID NO: 157334 - DNA, 20 bp, synthetic construct
  source 1..20: mol_type = other DNA
agaaacccaatcctggcaag

SEQ ID NO: 157335 - DNA, 20 bp, synthetic construct
  source 1..20: mol_type = other DNA
gagaaacccaatcctggcaa

SEQ ID NO: 157336 - DNA, 20 bp, synthetic construct
  source 1..20: mol_type = other DNA
tgagaaacccaatcctggca

SEQ ID NO: 157337 - DNA, 20 bp, synthetic construct
  source 1..20: mol_type = other DNA
gtgagaaacccaatcctggc

SEQ ID NO: 157338 - DNA, 20 bp, synthetic construct
  source 1..20: mol_type = other DNA
agtgagaaacccaatcctgg

SEQ ID NO: 157339 - DNA, 20 bp, synthetic construct
  source 1..20: mol_type = other DNA
aagtgagaaacccaatcctg

SEQ ID NO: 157340 - DNA, 20 bp, synthetic construct
  source 1..20: mol_type = other DNA
caagtgagaaacccaatcct

SEQ ID NO: 157341 - DNA, 20 bp, synthetic construct
  source 1..20: mol_type = other DNA
acaagtgagaaacccaatcc

SEQ ID NO: 157342 - DNA, 20 bp, synthetic construct
  source 1..20: mol_type = other DNA
aacaagtgagaaacccaatc

SEQ ID NO: 157343 - DNA, 20 bp, synthetic construct
  source 1..20: mol_type = other DNA
taacaagtgagaaacccaat

SEQ ID NO: 157344 - DNA, 20 bp, synthetic construct
  source 1..20: mol_type = other DNA
ttaacaagtgagaaacccaa

SEQ ID NO: 157345 - DNA, 20 bp, synthetic construct
  source 1..20: mol_type = other DNA
tttaacaagtgagaaaccca

SEQ ID NO: 157346 - DNA, 20 bp, synthetic construct
  source 1..20: mol_type = other DNA
gtttaacaagtgagaaaccc

SEQ ID NO: 157347 - DNA, 20 bp, synthetic construct
  source 1..20: mol_type = other DNA
tgtttaacaagtgagaaacc

SEQ ID NO: 157348 - DNA, 20 bp, synthetic construct
  source 1..20: mol_type = other DNA
ctgtttaacaagtgagaaac

SEQ ID NO: 157349 - DNA, 20 bp, synthetic construct
  source 1..20: mol_type = other DNA
tctgtttaacaagtgagaaa

SEQ ID NO: 157350 - DNA, 20 bp, synthetic construct
  source 1..20: mol_type = other DNA
ttctgtttaacaagtgagaa

SEQ ID NO: 157351 - DNA, 20 bp, synthetic construct
  source 1..20: mol_type = other DNA
gttctgtttaacaagtgaga

SEQ ID NO: 157352 - DNA, 20 bp, synthetic construct
  source 1..20: mol_type = other DNA
tgttctgtttaacaagtgag

SEQ ID NO: 157353 - DNA, 20 bp, synthetic construct
  source 1..20: mol_type = other DNA
atgttctgtttaacaagtga

SEQ ID NO: 157354 - DNA, 20 bp, synthetic construct
  source 1..20: mol_type = other DNA
aatgttctgtttaacaagtg

SEQ ID NO: 157355 - DNA, 20 bp, synthetic construct
  source 1..20: mol_type = other DNA
aaatgttctgtttaacaagt

SEQ ID NO: 157356 - DNA, 20 bp, synthetic construct
  source 1..20: mol_type = other DNA
aaaatgttctgtttaacaag

SEQ ID NO: 157357 - DNA, 20 bp, synthetic construct
  source 1..20: mol_type = other DNA
caaaatgttctgtttaacaa

SEQ ID NO: 157358 - DNA, 20 bp, synthetic construct
  source 1..20: mol_type = other DNA
acaaaatgttctgtttaaca

SEQ ID NO: 157359 - DNA, 20 bp, synthetic construct
  source 1..20: mol_type = other DNA
aacaaaatgttctgtttaac

SEQ ID NO: 157360 - DNA, 20 bp, synthetic construct
  source 1..20: mol_type = other DNA
taacaaaatgttctgtttaa

SEQ ID NO: 157361 - DNA, 20 bp, synthetic construct
  source 1..20: mol_type = other DNA
ttaacaaaatgttctgttta

SEQ ID NO: 157362 - DNA, 20 bp, synthetic construct
  source 1..20: mol_type = other DNA
cttaacaaaatgttctgttt

SEQ ID NO: 157363 - DNA, 20 bp, synthetic construct
  source 1..20: mol_type = other DNA
acttaacaaaatgttctgtt

SEQ ID NO: 157364 - DNA, 20 bp, synthetic construct
  source 1..20: mol_type = other DNA
aacttaacaaaatgttctgt

SEQ ID NO: 157365 - DNA, 20 bp, synthetic construct
  source 1..20: mol_type = other DNA
aaacttaacaaaatgttctg

SEQ ID NO: 157366 - DNA, 20 bp, synthetic construct
  source 1..20: mol_type = other DNA
taaacttaacaaaatgttct

SEQ ID NO: 157367 - DNA, 20 bp, synthetic construct
  source 1..20: mol_type = other DNA
ttaaacttaacaaaatgttc

SEQ ID NO: 157368 - DNA, 20 bp, synthetic construct
  source 1..20: mol_type = other DNA
tttaaacttaacaaaatgtt

SEQ ID NO: 157369 - DNA, 20 bp, synthetic construct
  source 1..20: mol_type = other DNA
ttttaaacttaacaaaatgt

SEQ ID NO: 157370 - DNA, 20 bp, synthetic construct
  source 1..20: mol_type = other DNA
gttttaaacttaacaaaatg

SEQ ID NO: 157371 - DNA, 20 bp, synthetic construct
  source 1..20: mol_type = other DNA
ggttttaaacttaacaaaat

SEQ ID NO: 157372 - DNA, 20 bp, synthetic construct
  source 1..20: mol_type = other DNA
aggttttaaacttaacaaaa

SEQ ID NO: 157373 - DNA, 20 bp, synthetic construct
  source 1..20: mol_type = other DNA
caggttttaaacttaacaaa

SEQ ID NO: 157374 - DNA, 20 bp, synthetic construct
  source 1..20: mol_type = other DNA
ccaggttttaaacttaacaa

SEQ ID NO: 157375 - DNA, 20 bp, synthetic construct
  source 1..20: mol_type = other DNA
cccaggttttaaacttaaca

SEQ ID NO: 157376 - DNA, 20 bp, synthetic construct
  source 1..20: mol_type = other DNA
tcccaggttttaaacttaac

SEQ ID NO: 157377 - DNA, 20 bp, synthetic construct
  source 1..20: mol_type = other DNA
atcccaggttttaaacttaa

SEQ ID NO: 157378 - DNA, 20 bp, synthetic construct
  source 1..20: mol_type = other DNA
catcccaggttttaaactta

SEQ ID NO: 157379 - DNA, 20 bp, synthetic construct
  source 1..20: mol_type = other DNA
ccatcccaggttttaaactt

SEQ ID NO: 157380 - DNA, 20 bp, synthetic construct
  source 1..20: mol_type = other DNA
tccatcccaggttttaaact

SEQ ID NO: 157381 - DNA, 20 bp, synthetic construct
  source 1..20: mol_type = other DNA
gtccatcccaggttttaaac

SEQ ID NO: 157382 - DNA, 20 bp, synthetic construct
  source 1..20: mol_type = other DNA
agtccatcccaggttttaaa

SEQ ID NO: 157383 - DNA, 20 bp, synthetic construct
  source 1..20: mol_type = other DNA
aagtccatcccaggttttaa

SEQ ID NO: 157384 - DNA, 20 bp, synthetic construct
  source 1..20: mol_type = other DNA
taagtccatcccaggtttta

SEQ ID NO: 157385 - DNA, 20 bp, synthetic construct
  source 1..20: mol_type = other DNA
ttaagtccatcccaggtttt

SEQ ID NO: 157386 - DNA, 20 bp, synthetic construct
  source 1..20: mol_type = other DNA
cttaagtccatcccaggttt

SEQ ID NO: 157387 - DNA, 20 bp, synthetic construct
  source 1..20: mol_type = other DNA
acttaagtccatcccaggtt

SEQ ID NO: 157388 - DNA, 20 bp, synthetic construct
  source 1..20: mol_type = other DNA
tacttaagtccatcccaggt

SEQ ID NO: 157389 - DNA, 20 bp, synthetic construct
  source 1..20: mol_type = other DNA
atacttaagtccatcccagg

SEQ ID NO: 157390 - DNA, 20 bp, synthetic construct
  source 1..20: mol_type = other DNA
aatacttaagtccatcccag

SEQ ID NO: 157391 - DNA, 20 bp, synthetic construct
  source 1..20: mol_type = other DNA
gaatacttaagtccatccca

SEQ ID NO: 157392 - DNA, 20 bp, synthetic construct
  source 1..20: mol_type = other DNA
tgaatacttaagtccatccc

SEQ ID NO: 157393 - DNA, 20 bp, synthetic construct
  source 1..20: mol_type = other DNA
atgaatacttaagtccatcc

SEQ ID NO: 157394 - DNA, 20 bp, synthetic construct
  source 1..20: mol_type = other DNA
catgaatacttaagtccatc

SEQ ID NO: 157395 - DNA, 20 bp, synthetic construct
  source 1..20: mol_type = other DNA
acatgaatacttaagtccat

SEQ ID NO: 157396 - DNA, 20 bp, synthetic construct
  source 1..20: mol_type = other DNA
aacatgaatacttaagtcca

SEQ ID NO: 157397 - DNA, 20 bp, synthetic construct
  source 1..20: mol_type = other DNA
gaacatgaatacttaagtcc

SEQ ID NO: 157398 - DNA, 20 bp, synthetic construct
  source 1..20: mol_type = other DNA
tgaacatgaatacttaagtc

SEQ ID NO: 157399 - DNA, 20 bp, synthetic construct
  source 1..20: mol_type = other DNA
atgaacatgaatacttaagt

SEQ ID NO: 157400 - DNA, 20 bp, synthetic construct
  source 1..20: mol_type = other DNA
aatgaacatgaatacttaag

SEQ ID NO: 157401 - DNA, 20 bp, synthetic construct
  source 1..20: mol_type = other DNA
gaatgaacatgaatacttaa

SEQ ID NO: 157402 - DNA, 20 bp, synthetic construct
  source 1..20: mol_type = other DNA
tgaatgaacatgaatactta

SEQ ID NO: 157403 - DNA, 20 bp, synthetic construct
  source 1..20: mol_type = other DNA
atgaatgaacatgaatactt

SEQ ID NO: 157404 - DNA, 20 bp, synthetic construct
  source 1..20: mol_type = other DNA
catgaatgaacatgaatact

SEQ ID NO: 157405 - DNA, 20 bp, synthetic construct
  source 1..20: mol_type = other DNA
acatgaatgaacatgaatac

SEQ ID NO: 157406 - DNA, 20 bp, synthetic construct
  source 1..20: mol_type = other DNA
aacatgaatgaacatgaata

SEQ ID NO: 157407 - DNA, 20 bp, synthetic construct
  source 1..20: mol_type = other DNA
gaacatgaatgaacatgaat

SEQ ID NO: 157408 - DNA, 20 bp, synthetic construct
  source 1..20: mol_type = other DNA
tgaacatgaatgaacatgaa

SEQ ID NO: 157409 - DNA, 20 bp, synthetic construct
  source 1..20: mol_type = other DNA
atgaacatgaatgaacatga

SEQ ID NO: 157410 - DNA, 20 bp, synthetic construct
  source 1..20: mol_type = other DNA
aatgaacatgaatgaacatg

SEQ ID NO: 157411 - DNA, 20 bp, synthetic construct
  source 1..20: mol_type = other DNA
gaatgaacatgaatgaacat

SEQ ID NO: 157412 - DNA, 20 bp, synthetic construct
  source 1..20: mol_type = other DNA
tgaatgaacatgaatgaaca

SEQ ID NO: 157413 - DNA, 20 bp, synthetic construct
  source 1..20: mol_type = other DNA
ctgaatgaacatgaatgaac

SEQ ID NO: 157414 - DNA, 20 bp, synthetic construct
  source 1..20: mol_type = other DNA
cctgaatgaacatgaatgaa

SEQ ID NO: 157415 - DNA, 20 bp, synthetic construct
  source 1..20: mol_type = other DNA
tcctgaatgaacatgaatga

SEQ ID NO: 157416 - DNA, 20 bp, synthetic construct
  source 1..20: mol_type = other DNA
gtcctgaatgaacatgaatg

SEQ ID NO: 157417 - DNA, 20 bp, synthetic construct
  source 1..20: mol_type = other DNA
agtcctgaatgaacatgaat

SEQ ID NO: 157418 - DNA, 20 bp, synthetic construct
  source 1..20: mol_type = other DNA
cagtcctgaatgaacatgaa

SEQ ID NO: 157419 - DNA, 20 bp, synthetic construct
  source 1..20: mol_type = other DNA
gcagtcctgaatgaacatga

SEQ ID NO: 157420 - DNA, 20 bp, synthetic construct
  source 1..20: mol_type = other DNA
tgcagtcctgaatgaacatg

SEQ ID NO: 157421 - DNA, 20 bp, synthetic construct
  source 1..20: mol_type = other DNA
ctgcagtcctgaatgaacat

SEQ ID NO: 157422 - DNA, 20 bp, synthetic construct
  source 1..20: mol_type = other DNA
cctgcagtcctgaatgaaca

SEQ ID NO: 157423 - DNA, 20 bp, synthetic construct
  source 1..20: mol_type = other DNA
acctgcagtcctgaatgaac

SEQ ID NO: 157424 - DNA, 20 bp, synthetic construct
  source 1..20: mol_type = other DNA
aacctgcagtcctgaatgaa

SEQ ID NO: 157425 - DNA, 20 bp, synthetic construct
  source 1..20: mol_type = other DNA
taacctgcagtcctgaatga

SEQ ID NO: 157426 - DNA, 20 bp, synthetic construct
  source 1..20: mol_type = other DNA
ataacctgcagtcctgaatg

SEQ ID NO: 157427 - DNA, 20 bp, synthetic construct
  source 1..20: mol_type = other DNA
gataacctgcagtcctgaat

SEQ ID NO: 157428 - DNA, 20 bp, synthetic construct
  source 1..20: mol_type = other DNA
tgataacctgcagtcctgaa

SEQ ID NO: 157429 - DNA, 20 bp, synthetic construct
  source 1..20: mol_type = other DNA
atgataacctgcagtcctga

SEQ ID NO: 157430 - DNA, 20 bp, synthetic construct
  source 1..20: mol_type = other DNA
catgataacctgcagtcctg

SEQ ID NO: 157431 - DNA, 20 bp, synthetic construct
  source 1..20: mol_type = other DNA
tcatgataacctgcagtcct

SEQ ID NO: 157432 - DNA, 20 bp, synthetic construct
  source 1..20: mol_type = other DNA
gtcatgataacctgcagtcc

SEQ ID NO: 157433 - DNA, 20 bp, synthetic construct
  source 1..20: mol_type = other DNA
agtcatgataacctgcagtc

SEQ ID NO: 157434 - DNA, 20 bp, synthetic construct
  source 1..20: mol_type = other DNA
aagtcatgataacctgcagt

SEQ ID NO: 157435 - DNA, 20 bp, synthetic construct
  source 1..20: mol_type = other DNA
caagtcatgataacctgcag

SEQ ID NO: 157436 - DNA, 20 bp, synthetic construct
  source 1..20: mol_type = other DNA
acaagtcatgataacctgca

SEQ ID NO: 157437 - DNA, 20 bp, synthetic construct
  source 1..20: mol_type = other DNA
aacaagtcatgataacctgc

SEQ ID NO: 157438 - DNA, 20 bp, synthetic construct
  source 1..20: mol_type = other DNA
aaacaagtcatgataacctg

SEQ ID NO: 157439 - DNA, 20 bp, synthetic construct
  source 1..20: mol_type = other DNA
taaacaagtcatgataacct

SEQ ID NO: 157440 - DNA, 20 bp, synthetic construct
  source 1..20: mol_type = other DNA
ttaaacaagtcatgataacc

SEQ ID NO: 157441 - DNA, 20 bp, synthetic construct
  source 1..20: mol_type = other DNA
gttaaacaagtcatgataac

SEQ ID NO: 157442 - DNA, 20 bp, synthetic construct
  source 1..20: mol_type = other DNA
agttaaacaagtcatgataa

SEQ ID NO: 157443 - DNA, 20 bp, synthetic construct
  source 1..20: mol_type = other DNA
aagttaaacaagtcatgata

SEQ ID NO: 157444 - DNA, 20 bp, synthetic construct
  source 1..20: mol_type = other DNA
caagttaaacaagtcatgat

SEQ ID NO: 157445 - DNA, 20 bp, synthetic construct
  source 1..20: mol_type = other DNA
acaagttaaacaagtcatga

SEQ ID NO: 157446 - DNA, 20 bp, synthetic construct
  source 1..20: mol_type = other DNA
cacaagttaaacaagtcatg

SEQ ID NO: 157447 - DNA, 20 bp, synthetic construct
  source 1..20: mol_type = other DNA
ccacaagttaaacaagtcat

SEQ ID NO: 157448 - DNA, 20 bp, synthetic construct
  source 1..20: mol_type = other DNA
cccacaagttaaacaagtca

SEQ ID NO: 157449 - DNA, 20 bp, synthetic construct
  source 1..20: mol_type = other DNA
tcccacaagttaaacaagtc

SEQ ID NO: 157450 - DNA, 20 bp, synthetic construct
  source 1..20: mol_type = other DNA
ttcccacaagttaaacaagt

SEQ ID NO: 157451 - DNA, 20 bp, synthetic construct
  source 1..20: mol_type = other DNA
cttcccacaagttaaacaag

SEQ ID NO: 157452 - DNA, 20 bp, synthetic construct
  source 1..20: mol_type = other DNA
gcttcccacaagttaaacaa

SEQ ID NO: 157453 - DNA, 20 bp, synthetic construct
  source 1..20: mol_type = other DNA
agcttcccacaagttaaaca

SEQ ID NO: 157454 - DNA, 20 bp, synthetic construct
  source 1..20: mol_type = other DNA
cagcttcccacaagttaaac

SEQ ID NO: 157455 - DNA, 20 bp, synthetic construct
  source 1..20: mol_type = other DNA
acagcttcccacaagttaaa

SEQ ID NO: 157456 - DNA, 20 bp, synthetic construct
  source 1..20: mol_type = other DNA
aacagcttcccacaagttaa

SEQ ID NO: 157457 - DNA, 20 bp, synthetic construct
  source 1..20: mol_type = other DNA
caacagcttcccacaagtta

SEQ ID NO: 157458 - DNA, 20 bp, synthetic construct
  source 1..20: mol_type = other DNA
acaacagcttcccacaagtt

SEQ ID NO: 157459 - DNA, 20 bp, synthetic construct
  source 1..20: mol_type = other DNA
gacaacagcttcccacaagt

SEQ ID NO: 157460 - DNA, 20 bp, synthetic construct
  source 1..20: mol_type = other DNA
ggacaacagcttcccacaag

SEQ ID NO: 157461 - DNA, 20 bp, synthetic construct
  source 1..20: mol_type = other DNA
gggacaacagcttcccacaa

SEQ ID NO: 157462 - DNA, 20 bp, synthetic construct
  source 1..20: mol_type = other DNA
tgggacaacagcttcccaca

SEQ ID NO: 157463 - DNA, 20 bp, synthetic construct
  source 1..20: mol_type = other DNA
ttgggacaacagcttcccac

SEQ ID NO: 157464 - DNA, 20 bp, synthetic construct
  source 1..20: mol_type = other DNA
cttgggacaacagcttccca

SEQ ID NO: 157465 - DNA, 20 bp, synthetic construct
  source 1..20: mol_type = other DNA
acttgggacaacagcttccc

SEQ ID NO: 157466 - DNA, 20 bp, synthetic construct
  source 1..20: mol_type = other DNA
aacttgggacaacagcttcc

SEQ ID NO: 157467 - DNA, 20 bp, synthetic construct
  source 1..20: mol_type = other DNA
taacttgggacaacagcttc

SEQ ID NO: 157468 - DNA, 20 bp, synthetic construct
  source 1..20: mol_type = other DNA
ataacttgggacaacagctt

SEQ ID NO: 157469 - DNA, 20 bp, synthetic construct
  source 1..20: mol_type = other DNA
gataacttgggacaacagct

SEQ ID NO: 157470 - DNA, 20 bp, synthetic construct
  source 1..20: mol_type = other DNA
ggataacttgggacaacagc

SEQ ID NO: 157471 - DNA, 20 bp, synthetic construct
  source 1..20: mol_type = other DNA
aggataacttgggacaacag

SEQ ID NO: 157472 - DNA, 20 bp, synthetic construct
  source 1..20: mol_type = other DNA
caggataacttgggacaaca

SEQ ID NO: 157473 - DNA, 20 bp, synthetic construct
  source 1..20: mol_type = other DNA
ccaggataacttgggacaac

SEQ ID NO: 157474 - DNA, 20 bp, synthetic construct
  source 1..20: mol_type = other DNA
cccaggataacttgggacaa

SEQ ID NO: 157475 - DNA, 20 bp, synthetic construct
  source 1..20: mol_type = other DNA
ccccaggataacttgggaca

SEQ ID NO: 157476 - DNA, 20 bp, synthetic construct
  source 1..20: mol_type = other DNA
tccccaggataacttgggac

SEQ ID NO: 157477 - DNA, 20 bp, synthetic construct
  source 1..20: mol_type = other DNA
ttccccaggataacttggga

SEQ ID NO: 157478 - DNA, 20 bp, synthetic construct
  source 1..20: mol_type = other DNA
gttccccaggataacttggg

SEQ ID NO: 157479 - DNA, 20 bp, synthetic construct
  source 1..20: mol_type = other DNA
agttccccaggataacttgg

SEQ ID NO: 157480 - DNA, 20 bp, synthetic construct
  source 1..20: mol_type = other DNA
cagttccccaggataacttg

SEQ ID NO: 157481 - DNA, 20 bp, synthetic construct
  source 1..20: mol_type = other DNA
gcagttccccaggataactt

SEQ ID NO: 157482 - DNA, 20 bp, synthetic construct
  source 1..20: mol_type = other DNA
tgcagttccccaggataact

SEQ ID NO: 157483 - DNA, 20 bp, synthetic construct
  source 1..20: mol_type = other DNA
atgcagttccccaggataac

SEQ ID NO: 157484 - DNA, 20 bp, synthetic construct
  source 1..20: mol_type = other DNA
gatgcagttccccaggataa

SEQ ID NO: 157485 - DNA, 20 bp, synthetic construct
  source 1..20: mol_type = other DNA
agatgcagttccccaggata

SEQ ID NO: 157486 - DNA, 20 bp, synthetic construct
  source 1..20: mol_type = other DNA
cagatgcagttccccaggat

SEQ ID NO: 157487 - DNA, 20 bp, synthetic construct
  source 1..20: mol_type = other DNA
ccagatgcagttccccagga

SEQ ID NO: 157488 - DNA, 20 bp, synthetic construct
  source 1..20: mol_type = other DNA
accagatgcagttccccagg

SEQ ID NO: 157489 - DNA, 20 bp, synthetic construct
  source 1..20: mol_type = other DNA
aaccagatgcagttccccag

SEQ ID NO: 157490 - DNA, 20 bp, synthetic construct
  source 1..20: mol_type = other DNA
gaaccagatgcagttcccca

SEQ ID NO: 157491 - DNA, 20 bp, synthetic construct
  source 1..20: mol_type = other DNA
agaaccagatgcagttcccc

SEQ ID NO: 157492 - DNA, 20 bp, synthetic construct
  source 1..20: mol_type = other DNA
aagaaccagatgcagttccc

SEQ ID NO: 157493 - DNA, 20 bp, synthetic construct
  source 1..20: mol_type = other DNA
caagaaccagatgcagttcc

SEQ ID NO: 157494 - DNA, 20 bp, synthetic construct
  source 1..20: mol_type = other DNA
gcaagaaccagatgcagttc

SEQ ID NO: 157495 - DNA, 20 bp, synthetic construct
  source 1..20: mol_type = other DNA
tgcaagaaccagatgcagtt

SEQ ID NO: 157496 - DNA, 20 bp, synthetic construct
  source 1..20: mol_type = other DNA
ttgcaagaaccagatgcagt

SEQ ID NO: 157497 - DNA, 20 bp, synthetic construct
  source 1..20: mol_type = other DNA
tttgcaagaaccagatgcag

SEQ ID NO: 157498 - DNA, 20 bp, synthetic construct
  source 1..20: mol_type = other DNA
ttttgcaagaaccagatgca

SEQ ID NO: 157499 - DNA, 20 bp, synthetic construct
  source 1..20: mol_type = other DNA
gttttgcaagaaccagatgc

SEQ ID NO: 157500 - DNA, 20 bp, synthetic construct
  source 1..20: mol_type = other DNA
tgttttgcaagaaccagatg

SEQ ID NO: 157501 - DNA, 20 bp, synthetic construct
  source 1..20: mol_type = other DNA
gtgttttgcaagaaccagat

SEQ ID NO: 157502 - DNA, 20 bp, synthetic construct
  source 1..20: mol_type = other DNA
ggtgttttgcaagaaccaga

SEQ ID NO: 157503 - DNA, 20 bp, synthetic construct
  source 1..20: mol_type = other DNA
tggtgttttgcaagaaccag

SEQ ID NO: 157504 - DNA, 20 bp, synthetic construct
  source 1..20: mol_type = other DNA
ttggtgttttgcaagaacca

SEQ ID NO: 157505 - DNA, 20 bp, synthetic construct
  source 1..20: mol_type = other DNA
cttggtgttttgcaagaacc

SEQ ID NO: 157506 - DNA, 20 bp, synthetic construct
  source 1..20: mol_type = other DNA
acttggtgttttgcaagaac

SEQ ID NO: 157507 - DNA, 20 bp, synthetic construct
  source 1..20: mol_type = other DNA
tacttggtgttttgcaagaa

SEQ ID NO: 157508 - DNA, 20 bp, synthetic construct
  source 1..20: mol_type = other DNA
ctacttggtgttttgcaaga

SEQ ID NO: 157509 - DNA, 20 bp, synthetic construct
  source 1..20: mol_type = other DNA
tctacttggtgttttgcaag

SEQ ID NO: 157510 - DNA, 20 bp, synthetic construct
  source 1..20: mol_type = other DNA
gtctacttggtgttttgcaa

SEQ ID NO: 157511 - DNA, 20 bp, synthetic construct
  source 1..20: mol_type = other DNA
tgtctacttggtgttttgca

SEQ ID NO: 157512 - DNA, 20 bp, synthetic construct
  source 1..20: mol_type = other DNA
ctgtctacttggtgttttgc

SEQ ID NO: 157513 - DNA, 20 bp, synthetic construct
  source 1..20: mol_type = other DNA
cctgtctacttggtgttttg

SEQ ID NO: 157514 - DNA, 20 bp, synthetic construct
  source 1..20: mol_type = other DNA
gcctgtctacttggtgtttt

SEQ ID NO: 157515 - DNA, 20 bp, synthetic construct
  source 1..20: mol_type = other DNA
agcctgtctacttggtgttt

SEQ ID NO: 157516 - DNA, 20 bp, synthetic construct
  source 1..20: mol_type = other DNA
gagcctgtctacttggtgtt

SEQ ID NO: 157517 - DNA, 20 bp, synthetic construct
  source 1..20: mol_type = other DNA
agagcctgtctacttggtgt

SEQ ID NO: 157518 - DNA, 20 bp, synthetic construct
  source 1..20: mol_type = other DNA
gagagcctgtctacttggtg

SEQ ID NO: 157519 - DNA, 20 bp, synthetic construct
  source 1..20: mol_type = other DNA
agagagcctgtctacttggt

SEQ ID NO: 157520 - DNA, 20 bp, synthetic construct
  source 1..20: mol_type = other DNA
aagagagcctgtctacttgg

SEQ ID NO: 157521 - DNA, 20 bp, synthetic construct
  source 1..20: mol_type = other DNA
aaagagagcctgtctacttg

SEQ ID NO: 157522 - DNA, 20 bp, synthetic construct
  source 1..20: mol_type = other DNA
aaaagagagcctgtctactt

SEQ ID NO: 157523 - DNA, 20 bp, synthetic construct
  source 1..20: mol_type = other DNA
taaaagagagcctgtctact

SEQ ID NO: 157524 - DNA, 20 bp, synthetic construct
  source 1..20: mol_type = other DNA
gtaaaagagagcctgtctac

SEQ ID NO: 157525 - DNA, 20 bp, synthetic construct
  source 1..20: mol_type = other DNA
ggtaaaagagagcctgtcta

SEQ ID NO: 157526 - DNA, 20 bp, synthetic construct
  source 1..20: mol_type = other DNA
aggtaaaagagagcctgtct

SEQ ID NO: 157527 - DNA, 20 bp, synthetic construct
  source 1..20: mol_type = other DNA
gaggtaaaagagagcctgtc

SEQ ID NO: 157528 - DNA, 20 bp, synthetic construct
  source 1..20: mol_type = other DNA
ggaggtaaaagagagcctgt

SEQ ID NO: 157529 - DNA, 20 bp, synthetic construct
  source 1..20: mol_type = other DNA
gggaggtaaaagagagcctg

SEQ ID NO: 157530 - DNA, 20 bp, synthetic construct
  source 1..20: mol_type = other DNA
ggggaggtaaaagagagcct

SEQ ID NO: 157531 - DNA, 20 bp, synthetic construct
  source 1..20: mol_type = other DNA
aggggaggtaaaagagagcc

SEQ ID NO: 157532 - DNA, 20 bp, synthetic construct
  source 1..20: mol_type = other DNA
aaggggaggtaaaagagagc

SEQ ID NO: 157533 - DNA, 20 bp, synthetic construct
  source 1..20: mol_type = other DNA
caaggggaggtaaaagagag

SEQ ID NO: 157534 - DNA, 20 bp, synthetic construct
  source 1..20: mol_type = other DNA
tcaaggggaggtaaaagaga

SEQ ID NO: 157535 - DNA, 20 bp, synthetic construct
  source 1..20: mol_type = other DNA
ctcaaggggaggtaaaagag

SEQ ID NO: 157536 - DNA, 20 bp, synthetic construct
  source 1..20: mol_type = other DNA
cctcaaggggaggtaaaaga

SEQ ID NO: 157537 - DNA, 20 bp, synthetic construct
  source 1..20: mol_type = other DNA
ccctcaaggggaggtaaaag

SEQ ID NO: 157538 - DNA, 20 bp, synthetic construct
  source 1..20: mol_type = other DNA
gccctcaaggggaggtaaaa

SEQ ID NO: 157539 - DNA, 20 bp, synthetic construct
  source 1..20: mol_type = other DNA
tgccctcaaggggaggtaaa

SEQ ID NO: 157540 - DNA, 20 bp, synthetic construct
  source 1..20: mol_type = other DNA
atgccctcaaggggaggtaa

SEQ ID NO: 157541 - DNA, 20 bp, synthetic construct
  source 1..20: mol_type = other DNA
aatgccctcaaggggaggta

SEQ ID NO: 157542 - DNA, 20 bp, synthetic construct
  source 1..20: mol_type = other DNA
taatgccctcaaggggaggt

SEQ ID NO: 157543 - DNA, 20 bp, synthetic construct
  source 1..20: mol_type = other DNA
ttaatgccctcaaggggagg

SEQ ID NO: 157544 - DNA, 20 bp, synthetic construct
  source 1..20: mol_type = other DNA
gttaatgccctcaaggggag

SEQ ID NO: 157545 - DNA, 20 bp, synthetic construct
  source 1..20: mol_type = other DNA
tgttaatgccctcaagggga

SEQ ID NO: 157546 - DNA, 20 bp, synthetic construct
  source 1..20: mol_type = other DNA
atgttaatgccctcaagggg

SEQ ID NO: 157547 - DNA, 20 bp, synthetic construct
  source 1..20: mol_type = other DNA
aatgttaatgccctcaaggg

SEQ ID NO: 157548 - DNA, 20 bp, synthetic construct
  source 1..20: mol_type = other DNA
gaatgttaatgccctcaagg

SEQ ID NO: 157549 - DNA, 20 bp, synthetic construct
  source 1..20: mol_type = other DNA
tgaatgttaatgccctcaag

SEQ ID NO: 157550 - DNA, 20 bp, synthetic construct
  source 1..20: mol_type = other DNA
ctgaatgttaatgccctcaa

SEQ ID NO: 157551 - DNA, 20 bp, synthetic construct
  source 1..20: mol_type = other DNA
actgaatgttaatgccctca

SEQ ID NO: 157552 - DNA, 20 bp, synthetic construct
  source 1..20: mol_type = other DNA
tactgaatgttaatgccctc

SEQ ID NO: 157553 - DNA, 20 bp, synthetic construct
  source 1..20: mol_type = other DNA
ctactgaatgttaatgccct

SEQ ID NO: 157554 - DNA, 20 bp, synthetic construct
  source 1..20: mol_type = other DNA
actactgaatgttaatgccc

SEQ ID NO: 157555 - DNA, 20 bp, synthetic construct
  source 1..20: mol_type = other DNA
gactactgaatgttaatgcc

SEQ ID NO: 157556 - DNA, 20 bp, synthetic construct
  source 1..20: mol_type = other DNA
tgactactgaatgttaatgc

SEQ ID NO: 157557 - DNA, 20 bp, synthetic construct
  source 1..20: mol_type = other DNA
gtgactactgaatgttaatg

SEQ ID NO: 157558 - DNA, 20 bp, synthetic construct
  source 1..20: mol_type = other DNA
agtgactactgaatgttaat

SEQ ID NO: 157559 - DNA, 20 bp, synthetic construct
  source 1..20: mol_type = other DNA
aagtgactactgaatgttaa

SEQ ID NO: 157560 - DNA, 20 bp, synthetic construct
  source 1..20: mol_type = other DNA
gaagtgactactgaatgtta

SEQ ID NO: 157561 - DNA, 20 bp, synthetic construct
  source 1..20: mol_type = other DNA
ggaagtgactactgaatgtt

SEQ ID NO: 157562 - DNA, 20 bp, synthetic construct
  source 1..20: mol_type = other DNA
tggaagtgactactgaatgt

SEQ ID NO: 157563 - DNA, 20 bp, synthetic construct
  source 1..20: mol_type = other DNA
atggaagtgactactgaatg

SEQ ID NO: 157564 - DNA, 20 bp, synthetic construct
  source 1..20: mol_type = other DNA
aatggaagtgactactgaat

SEQ ID NO: 157565 - DNA, 20 bp, synthetic construct
  source 1..20: mol_type = other DNA
gaatggaagtgactactgaa

SEQ ID NO: 157566 - DNA, 20 bp, synthetic construct
  source 1..20: mol_type = other DNA
tgaatggaagtgactactga

SEQ ID NO: 157567 - DNA, 20 bp, synthetic construct
  source 1..20: mol_type = other DNA
ctgaatggaagtgactactg

SEQ ID NO: 157568 - DNA, 20 bp, synthetic construct
  source 1..20: mol_type = other DNA
actgaatggaagtgactact

SEQ ID NO: 157569 - DNA, 20 bp, synthetic construct
  source 1..20: mol_type = other DNA
aactgaatggaagtgactac

SEQ ID NO: 157570 - DNA, 20 bp, synthetic construct
  source 1..20: mol_type = other DNA
taactgaatggaagtgacta

SEQ ID NO: 157571 - DNA, 20 bp, synthetic construct
  source 1..20: mol_type = other DNA
ttaactgaatggaagtgact

SEQ ID NO: 157572 - DNA, 20 bp, synthetic construct
  source 1..20: mol_type = other DNA
gttaactgaatggaagtgac

SEQ ID NO: 157573 - DNA, 20 bp, synthetic construct
  source 1..20: mol_type = other DNA
ggttaactgaatggaagtga

SEQ ID NO: 157574 - DNA, 20 bp, synthetic construct
  source 1..20: mol_type = other DNA
gggttaactgaatggaagtg

SEQ ID NO: 157575 - DNA, 20 bp, synthetic construct
  source 1..20: mol_type = other DNA
agggttaactgaatggaagt

SEQ ID NO: 157576 - DNA, 20 bp, synthetic construct
  source 1..20: mol_type = other DNA
aagggttaactgaatggaag

SEQ ID NO: 157577 - DNA, 20 bp, synthetic construct
  source 1..20: mol_type = other DNA
aaagggttaactgaatggaa

SEQ ID NO: 157578 - DNA, 20 bp, synthetic construct
  source 1..20: mol_type = other DNA
taaagggttaactgaatgga

SEQ ID NO: 157579 - DNA, 20 bp, synthetic construct
  source 1..20: mol_type = other DNA
ataaagggttaactgaatgg

SEQ ID NO: 157580 - DNA, 20 bp, synthetic construct
  source 1..20: mol_type = other DNA
aataaagggttaactgaatg

SEQ ID NO: 157581 - DNA, 20 bp, synthetic construct
  source 1..20: mol_type = other DNA
aaataaagggttaactgaat

SEQ ID NO: 157582 - DNA, 20 bp, synthetic construct
  source 1..20: mol_type = other DNA
aaaataaagggttaactgaa

SEQ ID NO: 157583 - DNA, 20 bp, synthetic construct
  source 1..20: mol_type = other DNA
aaaaataaagggttaactga

SEQ ID NO: 157584 - DNA, 20 bp, synthetic construct
  source 1..20: mol_type = other DNA
taaaaataaagggttaactg

SEQ ID NO: 157585 - DNA, 20 bp, synthetic construct
  source 1..20: mol_type = other DNA
ataaaaataaagggttaact

SEQ ID NO: 157586 - DNA, 20 bp, synthetic construct
  source 1..20: mol_type = other DNA
cataaaaataaagggttaac

SEQ ID NO: 157587 - DNA, 20 bp, synthetic construct
  source 1..20: mol_type = other DNA
ccataaaaataaagggttaa

SEQ ID NO: 157588 - DNA, 20 bp, synthetic construct
  source 1..20: mol_type = other DNA
accataaaaataaagggtta

SEQ ID NO: 157589 - DNA, 20 bp, synthetic construct
  source 1..20: mol_type = other DNA
aaccataaaaataaagggtt

SEQ ID NO: 157590 - DNA, 20 bp, synthetic construct
  source 1..20: mol_type = other DNA
aaaccataaaaataaagggt

SEQ ID NO: 157591 - DNA, 20 bp, synthetic construct
  source 1..20: mol_type = other DNA
aaaaccataaaaataaaggg

SEQ ID NO: 157592 - DNA, 20 bp, synthetic construct
  source 1..20: mol_type = other DNA
aaaaaccataaaaataaagg

SEQ ID NO: 157593 - DNA, 20 bp, synthetic construct
  source 1..20: mol_type = other DNA
gaaaaaccataaaaataaag

SEQ ID NO: 157594 - DNA, 20 bp, synthetic construct
  source 1..20: mol_type = other DNA
agaaaaaccataaaaataaa

SEQ ID NO: 157595 - DNA, 20 bp, synthetic construct
  source 1..20: mol_type = other DNA
aagaaaaaccataaaaataa

SEQ ID NO: 157596 - DNA, 20 bp, synthetic construct
  source 1..20: mol_type = other DNA
caagaaaaaccataaaaata

SEQ ID NO: 157597 - DNA, 20 bp, synthetic construct
  source 1..20: mol_type = other DNA
tcaagaaaaaccataaaaat

SEQ ID NO: 157598 - DNA, 20 bp, synthetic construct
  source 1..20: mol_type = other DNA
ctcaagaaaaaccataaaaa

SEQ ID NO: 157599 - DNA, 20 bp, synthetic construct
  source 1..20: mol_type = other DNA
gctcaagaaaaaccataaaa

SEQ ID NO: 157600 - DNA, 20 bp, synthetic construct
  source 1..20: mol_type = other DNA
ggctcaagaaaaaccataaa

SEQ ID NO: 157601 - DNA, 20 bp, synthetic construct
  source 1..20: mol_type = other DNA
tggctcaagaaaaaccataa

SEQ ID NO: 157602 - DNA, 20 bp, synthetic construct
  source 1..20: mol_type = other DNA
atggctcaagaaaaaccata

SEQ ID NO: 157603 - DNA, 20 bp, synthetic construct
  source 1..20: mol_type = other DNA
tatggctcaagaaaaaccat

SEQ ID NO: 157604 - DNA, 20 bp, synthetic construct
  source 1..20: mol_type = other DNA
ctatggctcaagaaaaacca

SEQ ID NO: 157605 - DNA, 20 bp, synthetic construct
  source 1..20: mol_type = other DNA
actatggctcaagaaaaacc

SEQ ID NO: 157606 - DNA, 20 bp, synthetic construct
  source 1..20: mol_type = other DNA
aactatggctcaagaaaaac

SEQ ID NO: 157607 - DNA, 20 bp, synthetic construct
  source 1..20: mol_type = other DNA
caactatggctcaagaaaaa

SEQ ID NO: 157608 - DNA, 20 bp, synthetic construct
  source 1..20: mol_type = other DNA
acaactatggctcaagaaaa

SEQ ID NO: 157609 - DNA, 20 bp, synthetic construct
  source 1..20: mol_type = other DNA
tacaactatggctcaagaaa

SEQ ID NO: 157610 - DNA, 20 bp, synthetic construct
  source 1..20: mol_type = other DNA
ttacaactatggctcaagaa

SEQ ID NO: 157611 - DNA, 20 bp, synthetic construct
  source 1..20: mol_type = other DNA
tttacaactatggctcaaga

SEQ ID NO: 157612 - DNA, 20 bp, synthetic construct
  source 1..20: mol_type = other DNA
ctttacaactatggctcaag

SEQ ID NO: 157613 - DNA, 20 bp, synthetic construct
  source 1..20: mol_type = other DNA
gctttacaactatggctcaa

SEQ ID NO: 157614 - DNA, 20 bp, synthetic construct
  source 1..20: mol_type = other DNA
tgctttacaactatggctca

SEQ ID NO: 157615 - DNA, 20 bp, synthetic construct
  source 1..20: mol_type = other DNA
ctgctttacaactatggctc

SEQ ID NO: 157616 - DNA, 20 bp, synthetic construct
  source 1..20: mol_type = other DNA
tctgctttacaactatggct

SEQ ID NO: 157617 - DNA, 20 bp, synthetic construct
  source 1..20: mol_type = other DNA
ttctgctttacaactatggc

SEQ ID NO: 157618 - DNA, 20 bp, synthetic construct
  source 1..20: mol_type = other DNA
tttctgctttacaactatgg

SEQ ID NO: 157619 - DNA, 20 bp, synthetic construct
  source 1..20: mol_type = other DNA
ttttctgctttacaactatg

SEQ ID NO: 157620 - DNA, 20 bp, synthetic construct
  source 1..20: mol_type = other DNA
tttttctgctttacaactat

SEQ ID NO: 157621 - DNA, 20 bp, synthetic construct
  source 1..20: mol_type = other DNA
atttttctgctttacaacta

SEQ ID NO: 157622 - DNA, 20 bp, synthetic construct
  source 1..20: mol_type = other DNA
gatttttctgctttacaact

SEQ ID NO: 157623 - DNA, 20 bp, synthetic construct
  source 1..20: mol_type = other DNA
tgatttttctgctttacaac

SEQ ID NO: 157624 - DNA, 20 bp, synthetic construct
  source 1..20: mol_type = other DNA
atgatttttctgctttacaa

SEQ ID NO: 157625 - DNA, 20 bp, synthetic construct
  source 1..20: mol_type = other DNA
aatgatttttctgctttaca

SEQ ID NO: 157626 - DNA, 20 bp, synthetic construct
  source 1..20: mol_type = other DNA
aaatgatttttctgctttac

SEQ ID NO: 157627 - DNA, 20 bp, synthetic construct
  source 1..20: mol_type = other DNA
taaatgatttttctgcttta

SEQ ID NO: 157628 - DNA, 20 bp, synthetic construct
  source 1..20: mol_type = other DNA
ataaatgatttttctgcttt

SEQ ID NO: 157629 - DNA, 20 bp, synthetic construct
  source 1..20: mol_type = other DNA
tataaatgatttttctgctt

SEQ ID NO: 157630 - DNA, 20 bp, synthetic construct
  source 1..20: mol_type = other DNA
ttataaatgatttttctgct

SEQ ID NO: 157631 - DNA, 20 bp, synthetic construct
  source 1..20: mol_type = other DNA
tttataaatgatttttctgc

SEQ ID NO: 157632 - DNA, 20 bp, synthetic construct
  source 1..20: mol_type = other DNA
ctttataaatgatttttctg

SEQ ID NO: 157633 - DNA, 20 bp, synthetic construct
  source 1..20: mol_type = other DNA
cctttataaatgatttttct

SEQ ID NO: 157634 - DNA, 20 bp, synthetic construct
  source 1..20: mol_type = other DNA
acctttataaatgatttttc

SEQ ID NO: 157635 - DNA, 20 bp, synthetic construct
  source 1..20: mol_type = other DNA
aacctttataaatgattttt

SEQ ID NO: 157636 - DNA, 20 bp, synthetic construct
  source 1..20: mol_type = other DNA
aaacctttataaatgatttt

SEQ ID NO: 157637 - DNA, 20 bp, synthetic construct
  source 1..20: mol_type = other DNA
caaacctttataaatgattt

SEQ ID NO: 157638 - DNA, 20 bp, synthetic construct
  source 1..20: mol_type = other DNA
acaaacctttataaatgatt

SEQ ID NO: 157639 - DNA, 20 bp, synthetic construct
  source 1..20: mol_type = other DNA
aacaaacctttataaatgat

SEQ ID NO: 157640 - DNA, 20 bp, synthetic construct
  source 1..20: mol_type = other DNA
caacaaacctttataaatga

SEQ ID NO: 157641 - DNA, 20 bp, synthetic construct
  source 1..20: mol_type = other DNA
tcaacaaacctttataaatg

SEQ ID NO: 157642 - DNA, 20 bp, synthetic construct
  source 1..20: mol_type = other DNA
ttcaacaaacctttataaat

SEQ ID NO: 157643 - DNA, 20 bp, synthetic construct
  source 1..20: mol_type = other DNA
gttcaacaaacctttataaa

SEQ ID NO: 157644 - DNA, 20 bp, synthetic construct
  source 1..20: mol_type = other DNA
tgttcaacaaacctttataa

SEQ ID NO: 157645 - DNA, 20 bp, synthetic construct
  source 1..20: mol_type = other DNA
ttgttcaacaaacctttata

SEQ ID NO: 157646 - DNA, 20 bp, synthetic construct
  source 1..20: mol_type = other DNA
tttgttcaacaaacctttat

SEQ ID NO: 157647 - DNA, 20 bp, synthetic construct
  source 1..20: mol_type = other DNA
ttttgttcaacaaaccttta

SEQ ID NO: 157648 - DNA, 20 bp, synthetic construct
  source 1..20: mol_type = other DNA
attttgttcaacaaaccttt

SEQ ID NO: 157649 - DNA, 20 bp, synthetic construct
  source 1..20: mol_type = other DNA
aattttgttcaacaaacctt

SEQ ID NO: 157650 - DNA, 20 bp, synthetic construct
  source 1..20: mol_type = other DNA
gaattttgttcaacaaacct

SEQ ID NO: 157651 - DNA, 20 bp, synthetic construct
  source 1..20: mol_type = other DNA
tgaattttgttcaacaaacc

SEQ ID NO: 157652 - DNA, 20 bp, synthetic construct
  source 1..20: mol_type = other DNA
ttgaattttgttcaacaaac

SEQ ID NO: 157653 - DNA, 20 bp, synthetic construct
  source 1..20: mol_type = other DNA
tttgaattttgttcaacaaa

SEQ ID NO: 157654 - DNA, 20 bp, synthetic construct
  source 1..20: mol_type = other DNA
ttttgaattttgttcaacaa

SEQ ID NO: 157655 - DNA, 20 bp, synthetic construct
  source 1..20: mol_type = other DNA
attttgaattttgttcaaca

SEQ ID NO: 157656 - DNA, 20 bp, synthetic construct
  source 1..20: mol_type = other DNA
tattttgaattttgttcaac

SEQ ID NO: 157657 - DNA, 20 bp, synthetic construct
  source 1..20: mol_type = other DNA
gtattttgaattttgttcaa

SEQ ID NO: 157658 - DNA, 20 bp, synthetic construct
  source 1..20: mol_type = other DNA
agtattttgaattttgttca

SEQ ID NO: 157659 - DNA, 20 bp, synthetic construct
  source 1..20: mol_type = other DNA
cagtattttgaattttgttc

SEQ ID NO: 157660 - DNA, 20 bp, synthetic construct
  source 1..20: mol_type = other DNA
acagtattttgaattttgtt

SEQ ID NO: 157661 - DNA, 20 bp, synthetic construct
  source 1..20: mol_type = other DNA
aacagtattttgaattttgt

SEQ ID NO: 157662 - DNA, 20 bp, synthetic construct
  source 1..20: mol_type = other DNA
caacagtattttgaattttg

SEQ ID NO: 157663 - DNA, 20 bp, synthetic construct
  source 1..20: mol_type = other DNA
gcaacagtattttgaatttt

SEQ ID NO: 157664 - DNA, 20 bp, synthetic construct
  source 1..20: mol_type = other DNA
agcaacagtattttgaattt

SEQ ID NO: 157665 - DNA, 20 bp, synthetic construct
  source 1..20: mol_type = other DNA
aagcaacagtattttgaatt

SEQ ID NO: 157666 - DNA, 20 bp, synthetic construct
  source 1..20: mol_type = other DNA
taagcaacagtattttgaat

SEQ ID NO: 157667 - DNA, 20 bp, synthetic construct
  source 1..20: mol_type = other DNA
ttaagcaacagtattttgaa

SEQ ID NO: 157668 - DNA, 20 bp, synthetic construct
  source 1..20: mol_type = other DNA
tttaagcaacagtattttga

SEQ ID NO: 157669 - DNA, 20 bp, synthetic construct
  source 1..20: mol_type = other DNA
ctttaagcaacagtattttg

SEQ ID NO: 157670 - DNA, 20 bp, synthetic construct
  source 1..20: mol_type = other DNA
actttaagcaacagtatttt

SEQ ID NO: 157671 - DNA, 20 bp, synthetic construct
  source 1..20: mol_type = other DNA
tactttaagcaacagtattt

SEQ ID NO: 157672 - DNA, 20 bp, synthetic construct
  source 1..20: mol_type = other DNA
atactttaagcaacagtatt

SEQ ID NO: 157673 - DNA, 20 bp, synthetic construct
  source 1..20: mol_type = other DNA
aatactttaagcaacagtat

SEQ ID NO: 157674 - DNA, 20 bp, synthetic construct
  source 1..20: mol_type = other DNA
taatactttaagcaacagta

SEQ ID NO: 157675 - DNA, 20 bp, synthetic construct
  source 1..20: mol_type = other DNA
ttaatactttaagcaacagt

SEQ ID NO: 157676 - DNA, 20 bp, synthetic construct
  source 1..20: mol_type = other DNA
cttaatactttaagcaacag

SEQ ID NO: 157677 - DNA, 20 bp, synthetic construct
  source 1..20: mol_type = other DNA
tcttaatactttaagcaaca

SEQ ID NO: 157678 - DNA, 20 bp, synthetic construct
  source 1..20: mol_type = other DNA
atcttaatactttaagcaac

SEQ ID NO: 157679 - DNA, 20 bp, synthetic construct
  source 1..20: mol_type = other DNA
aatcttaatactttaagcaa

SEQ ID NO: 157680 - DNA, 20 bp, synthetic construct
  source 1..20: mol_type = other DNA
aaatcttaatactttaagca

SEQ ID NO: 157681 - DNA, 20 bp, synthetic construct
  source 1..20: mol_type = other DNA
aaaatcttaatactttaagc

SEQ ID NO: 157682 - DNA, 20 bp, synthetic construct
  source 1..20: mol_type = other DNA
aaaaatcttaatactttaag

SEQ ID NO: 157683 - DNA, 20 bp, synthetic construct
  source 1..20: mol_type = other DNA
aaaaaatcttaatactttaa

SEQ ID NO: 157684 - DNA, 20 bp, synthetic construct
  source 1..20: mol_type = other DNA
taaaaaatcttaatacttta

SEQ ID NO: 157685 - DNA, 20 bp, synthetic construct
  source 1..20: mol_type = other DNA
ctaaaaaatcttaatacttt

SEQ ID NO: 157686 - DNA, 20 bp, synthetic construct
  source 1..20: mol_type = other DNA
cctaaaaaatcttaatactt

SEQ ID NO: 157687 - DNA, 20 bp, synthetic construct
  source 1..20: mol_type = other DNA
tcctaaaaaatcttaatact

SEQ ID NO: 157688 - DNA, 20 bp, synthetic construct
  source 1..20: mol_type = other DNA
atcctaaaaaatcttaatac

SEQ ID NO: 157689 - DNA, 20 bp, synthetic construct
  source 1..20: mol_type = other DNA
aatcctaaaaaatcttaata

SEQ ID NO: 157690 - DNA, 20 bp, synthetic construct
  source 1..20: mol_type = other DNA
taatcctaaaaaatcttaat

SEQ ID NO: 157691 - DNA, 20 bp, synthetic construct
  source 1..20: mol_type = other DNA
ataatcctaaaaaatcttaa

SEQ ID NO: 157692 - DNA, 20 bp, synthetic construct
  source 1..20: mol_type = other DNA
tataatcctaaaaaatctta

SEQ ID NO: 157693 - DNA, 20 bp, synthetic construct
  source 1..20: mol_type = other DNA
gtataatcctaaaaaatctt

SEQ ID NO: 157694 - DNA, 20 bp, synthetic construct
  source 1..20: mol_type = other DNA
ggtataatcctaaaaaatct

SEQ ID NO: 157695 - DNA, 20 bp, synthetic construct
  source 1..20: mol_type = other DNA
aggtataatcctaaaaaatc

SEQ ID NO: 157696 - DNA, 20 bp, synthetic construct
  source 1..20: mol_type = other DNA
aaggtataatcctaaaaaat

SEQ ID NO: 157697 - DNA, 20 bp, synthetic construct
  source 1..20: mol_type = other DNA
taaggtataatcctaaaaaa

SEQ ID NO: 157698 - DNA, 20 bp, synthetic construct
  source 1..20: mol_type = other DNA
gtaaggtataatcctaaaaa

SEQ ID NO: 157699 - DNA, 20 bp, synthetic construct
  source 1..20: mol_type = other DNA
agtaaggtataatcctaaaa

SEQ ID NO: 157700 - DNA, 20 bp, synthetic construct
  source 1..20: mol_type = other DNA
aagtaaggtataatcctaaa

SEQ ID NO: 157701 - DNA, 20 bp, synthetic construct
  source 1..20: mol_type = other DNA
taagtaaggtataatcctaa

SEQ ID NO: 157702 - DNA, 20 bp, synthetic construct
  source 1..20: mol_type = other DNA
ataagtaaggtataatccta

SEQ ID NO: 157703 - DNA, 20 bp, synthetic construct
  source 1..20: mol_type = other DNA
tataagtaaggtataatcct

SEQ ID NO: 157704 - DNA, 20 bp, synthetic construct
  source 1..20: mol_type = other DNA
ctataagtaaggtataatcc

SEQ ID NO: 157705 - DNA, 20 bp, synthetic construct
  source 1..20: mol_type = other DNA
cctataagtaaggtataatc

SEQ ID NO: 157706 - DNA, 20 bp, synthetic construct
  source 1..20: mol_type = other DNA
gcctataagtaaggtataat

SEQ ID NO: 157707 - DNA, 20 bp, synthetic construct
  source 1..20: mol_type = other DNA
ggcctataagtaaggtataa

SEQ ID NO: 157708 - DNA, 20 bp, synthetic construct
  source 1..20: mol_type = other DNA
gggcctataagtaaggtata

SEQ ID NO: 157709 - DNA, 20 bp, synthetic construct
  source 1..20: mol_type = other DNA
cgggcctataagtaaggtat

SEQ ID NO: 157710 - DNA, 20 bp, synthetic construct
  source 1..20: mol_type = other DNA
acgggcctataagtaaggta

SEQ ID NO: 157711 - DNA, 20 bp, synthetic construct
  source 1..20: mol_type = other DNA
gacgggcctataagtaaggt

SEQ ID NO: 157712 - DNA, 20 bp, synthetic construct
  source 1..20: mol_type = other DNA
tgacgggcctataagtaagg

SEQ ID NO: 157713 - DNA, 20 bp, synthetic construct
  source 1..20: mol_type = other DNA
atgacgggcctataagtaag

SEQ ID NO: 157714 - DNA, 20 bp, synthetic construct
  source 1..20: mol_type = other DNA
aatgacgggcctataagtaa

SEQ ID NO: 157715 - DNA, 20 bp, synthetic construct
  source 1..20: mol_type = other DNA
gaatgacgggcctataagta

SEQ ID NO: 157716 - DNA, 20 bp, synthetic construct
  source 1..20: mol_type = other DNA
tgaatgacgggcctataagt

SEQ ID NO: 157717 - DNA, 20 bp, synthetic construct
  source 1..20: mol_type = other DNA
atgaatgacgggcctataag

SEQ ID NO: 157718 - DNA, 20 bp, synthetic construct
  source 1..20: mol_type = other DNA
aatgaatgacgggcctataa

SEQ ID NO: 157719 - DNA, 20 bp, synthetic construct
  source 1..20: mol_type = other DNA
aaatgaatgacgggcctata

SEQ ID NO: 157720 - DNA, 20 bp, synthetic construct
  source 1..20: mol_type = other DNA
caaatgaatgacgggcctat

SEQ ID NO: 157721 - DNA, 20 bp, synthetic construct
  source 1..20: mol_type = other DNA
ccaaatgaatgacgggccta

SEQ ID NO: 157722 - DNA, 20 bp, synthetic construct
  source 1..20: mol_type = other DNA
gccaaatgaatgacgggcct

SEQ ID NO: 157723 - DNA, 20 bp, synthetic construct
  source 1..20: mol_type = other DNA
tgccaaatgaatgacgggcc

SEQ ID NO: 157724 - DNA, 20 bp, synthetic construct
  source 1..20: mol_type = other DNA
atgccaaatgaatgacgggc

SEQ ID NO: 157725 - DNA, 20 bp, synthetic construct
  source 1..20: mol_type = other DNA
catgccaaatgaatgacggg

SEQ ID NO: 157726 - DNA, 20 bp, synthetic construct
  source 1..20: mol_type = other DNA
tcatgccaaatgaatgacgg

SEQ ID NO: 157727 - DNA, 20 bp, synthetic construct
  source 1..20: mol_type = other DNA
ttcatgccaaatgaatgacg

SEQ ID NO: 157728 - DNA, 20 bp, synthetic construct
  source 1..20: mol_type = other DNA
tttcatgccaaatgaatgac

SEQ ID NO: 157729 - DNA, 20 bp, synthetic construct
  source 1..20: mol_type = other DNA
atttcatgccaaatgaatga

SEQ ID NO: 157730 - DNA, 20 bp, synthetic construct
  source 1..20: mol_type = other DNA
aatttcatgccaaatgaatg

SEQ ID NO: 157731 - DNA, 20 bp, synthetic construct
  source 1..20: mol_type = other DNA
aaatttcatgccaaatgaat

SEQ ID NO: 157732 - DNA, 20 bp, synthetic construct
  source 1..20: mol_type = other DNA
aaaatttcatgccaaatgaa

SEQ ID NO: 157733 - DNA, 20 bp, synthetic construct
  source 1..20: mol_type = other DNA
caaaatttcatgccaaatga

SEQ ID NO: 157734 - DNA, 20 bp, synthetic construct
  source 1..20: mol_type = other DNA
tcaaaatttcatgccaaatg

SEQ ID NO: 157735 - DNA, 20 bp, synthetic construct
  source 1..20: mol_type = other DNA
ctcaaaatttcatgccaaat

SEQ ID NO: 157736 - DNA, 20 bp, synthetic construct
  source 1..20: mol_type = other DNA
actcaaaatttcatgccaaa

SEQ ID NO: 157737 - DNA, 20 bp, synthetic construct
  source 1..20: mol_type = other DNA
aactcaaaatttcatgccaa

SEQ ID NO: 157738 - DNA, 20 bp, synthetic construct
  source 1..20: mol_type = other DNA
aaactcaaaatttcatgcca

SEQ ID NO: 157739 - DNA, 20 bp, synthetic construct
  source 1..20: mol_type = other DNA
aaaactcaaaatttcatgcc

SEQ ID NO: 157740 - DNA, 20 bp, synthetic construct
  source 1..20: mol_type = other DNA
taaaactcaaaatttcatgc

SEQ ID NO: 157741 - DNA, 20 bp, synthetic construct
  source 1..20: mol_type = other DNA
ataaaactcaaaatttcatg

SEQ ID NO: 157742 - DNA, 20 bp, synthetic construct
  source 1..20: mol_type = other DNA
aataaaactcaaaatttcat

SEQ ID NO: 157743 - DNA, 20 bp, synthetic construct
  source 1..20: mol_type = other DNA
gaataaaactcaaaatttca

SEQ ID NO: 157744 - DNA, 20 bp, synthetic construct
  source 1..20: mol_type = other DNA
tgaataaaactcaaaatttc

SEQ ID NO: 157745 - DNA, 20 bp, synthetic construct
  source 1..20: mol_type = other DNA
gtgaataaaactcaaaattt

SEQ ID NO: 157746 - DNA, 20 bp, synthetic construct
  source 1..20: mol_type = other DNA
agtgaataaaactcaaaatt

SEQ ID NO: 157747 - DNA, 20 bp, synthetic construct
  source 1..20: mol_type = other DNA
aagtgaataaaactcaaaat

SEQ ID NO: 157748 - DNA, 20 bp, synthetic construct
  source 1..20: mol_type = other DNA
aaagtgaataaaactcaaaa

SEQ ID NO: 157749 - DNA, 20 bp, synthetic construct
  source 1..20: mol_type = other DNA
gaaagtgaataaaactcaaa

SEQ ID NO: 157750 - DNA, 20 bp, synthetic construct
  source 1..20: mol_type = other DNA
tgaaagtgaataaaactcaa

SEQ ID NO: 157751 - DNA, 20 bp, synthetic construct
  source 1..20: mol_type = other DNA
gtgaaagtgaataaaactca

SEQ ID NO: 157752 - DNA, 20 bp, synthetic construct
  source 1..20: mol_type = other DNA
agtgaaagtgaataaaactc

SEQ ID NO: 157753 - DNA, 20 bp, synthetic construct
  source 1..20: mol_type = other DNA
aagtgaaagtgaataaaact

SEQ ID NO: 157754 - DNA, 20 bp, synthetic construct
  source 1..20: mol_type = other DNA
aaagtgaaagtgaataaaac

SEQ ID NO: 157755 - DNA, 20 bp, synthetic construct
  source 1..20: mol_type = other DNA
gaaagtgaaagtgaataaaa

SEQ ID NO: 157756 - DNA, 20 bp, synthetic construct
  source 1..20: mol_type = other DNA
ggaaagtgaaagtgaataaa

SEQ ID NO: 157757 - DNA, 20 bp, synthetic construct
  source 1..20: mol_type = other DNA
aggaaagtgaaagtgaataa

SEQ ID NO: 157758 - DNA, 20 bp, synthetic construct
  source 1..20: mol_type = other DNA
aaggaaagtgaaagtgaata

SEQ ID NO: 157759 - DNA, 20 bp, synthetic construct
  source 1..20: mol_type = other DNA
aaaggaaagtgaaagtgaat

SEQ ID NO: 157760 - DNA, 20 bp, synthetic construct
  source 1..20: mol_type = other DNA
aaaaggaaagtgaaagtgaa

SEQ ID NO: 157761 - DNA, 20 bp, synthetic construct
  source 1..20: mol_type = other DNA
aaaaaggaaagtgaaagtga

SEQ ID NO: 157762 - DNA, 20 bp, synthetic construct
  source 1..20: mol_type = other DNA
aaaaaaggaaagtgaaagtg

SEQ ID NO: 157763 - DNA, 20 bp, synthetic construct
  source 1..20: mol_type = other DNA
aaaaaaaggaaagtgaaagt

SEQ ID NO: 157764 - DNA, 20 bp, synthetic construct
  source 1..20: mol_type = other DNA
gaaaaaaaggaaagtgaaag

SEQ ID NO: 157765 - DNA, 20 bp, synthetic construct
  source 1..20: mol_type = other DNA
ggaaaaaaaggaaagtgaaa

SEQ ID NO: 157766 - DNA, 20 bp, synthetic construct
  source 1..20: mol_type = other DNA
tggaaaaaaaggaaagtgaa

SEQ ID NO: 157767 - DNA, 20 bp, synthetic construct
  source 1..20: mol_type = other DNA
ttggaaaaaaaggaaagtga

SEQ ID NO: 157768 - DNA, 20 bp, synthetic construct
  source 1..20: mol_type = other DNA
tttggaaaaaaaggaaagtg

SEQ ID NO: 157769 - DNA, 20 bp, synthetic construct
  source 1..20: mol_type = other DNA
ctttggaaaaaaaggaaagt

SEQ ID NO: 157770 - DNA, 20 bp, synthetic construct
  source 1..20: mol_type = other DNA
gctttggaaaaaaaggaaag

SEQ ID NO: 157771 - DNA, 20 bp, synthetic construct
  source 1..20: mol_type = other DNA
tgctttggaaaaaaaggaaa

SEQ ID NO: 157772 - DNA, 20 bp, synthetic construct
  source 1..20: mol_type = other DNA
ttgctttggaaaaaaaggaa

SEQ ID NO: 157773 - DNA, 20 bp, synthetic construct
  source 1..20: mol_type = other DNA
attgctttggaaaaaaagga

SEQ ID NO: 157774 - DNA, 20 bp, synthetic construct
  source 1..20: mol_type = other DNA
aattgctttggaaaaaaagg

SEQ ID NO: 157775 - DNA, 20 bp, synthetic construct
  source 1..20: mol_type = other DNA
taattgctttggaaaaaaag

SEQ ID NO: 157776 - DNA, 20 bp, synthetic construct
  source 1..20: mol_type = other DNA
ttaattgctttggaaaaaaa

SEQ ID NO: 157777 - DNA, 20 bp, synthetic construct
  source 1..20: mol_type = other DNA
tttaattgctttggaaaaaa

SEQ ID NO: 157778 - DNA, 20 bp, synthetic construct
  source 1..20: mol_type = other DNA
ttttaattgctttggaaaaa

SEQ ID NO: 157779 - DNA, 20 bp, synthetic construct
  source 1..20: mol_type = other DNA
tttttaattgctttggaaaa

SEQ ID NO: 157780 - DNA, 20 bp, synthetic construct
  source 1..20: mol_type = other DNA
ttttttaattgctttggaaa

SEQ ID NO: 157781 - DNA, 20 bp, synthetic construct
  source 1..20: mol_type = other DNA
tttttttaattgctttggaa

SEQ ID NO: 157782 - DNA, 20 bp, synthetic construct
  source 1..20: mol_type = other DNA
gtttttttaattgctttgga

SEQ ID NO: 157783 - DNA, 20 bp, synthetic construct
  source 1..20: mol_type = other DNA
agtttttttaattgctttgg

SEQ ID NO: 157784 - DNA, 20 bp, synthetic construct
  source 1..20: mol_type = other DNA
cagtttttttaattgctttg

SEQ ID NO: 157785 - DNA, 20 bp, synthetic construct
  source 1..20: mol_type = other DNA
gcagtttttttaattgcttt

SEQ ID NO: 157786 - DNA, 20 bp, synthetic construct
  source 1..20: mol_type = other DNA
ggcagtttttttaattgctt

SEQ ID NO: 157787 - DNA, 20 bp, synthetic construct
  source 1..20: mol_type = other DNA
tggcagtttttttaattgct

SEQ ID NO: 157788 - DNA, 20 bp, synthetic construct
  source 1..20: mol_type = other DNA
ttggcagtttttttaattgc

SEQ ID NO: 157789 - DNA, 20 bp, synthetic construct
  source 1..20: mol_type = other DNA
tttggcagtttttttaattg

SEQ ID NO: 157790 - DNA, 20 bp, synthetic construct
  source 1..20: mol_type = other DNA
ctttggcagtttttttaatt

SEQ ID NO: 157791 - DNA, 20 bp, synthetic construct
  source 1..20: mol_type = other DNA
actttggcagtttttttaat

SEQ ID NO: 157792 - DNA, 20 bp, synthetic construct
  source 1..20: mol_type = other DNA
tactttggcagtttttttaa

SEQ ID NO: 157793 - DNA, 20 bp, synthetic construct
  source 1..20: mol_type = other DNA
ttactttggcagttttttta

SEQ ID NO: 157794 - DNA, 20 bp, synthetic construct
  source 1..20: mol_type = other DNA
cttactttggcagttttttt

SEQ ID NO: 157795 - DNA, 20 bp, synthetic construct
  source 1..20: mol_type = other DNA
tcttactttggcagtttttt

SEQ ID NO: 157796 - DNA, 20 bp, synthetic construct
  source 1..20: mol_type = other DNA
ctcttactttggcagttttt

SEQ ID NO: 157797 - DNA, 20 bp, synthetic construct
  source 1..20: mol_type = other DNA
actcttactttggcagtttt

SEQ ID NO: 157798 - DNA, 20 bp, synthetic construct
  source 1..20: mol_type = other DNA
cactcttactttggcagttt

SEQ ID NO: 157799 - DNA, 20 bp, synthetic construct
  source 1..20: mol_type = other DNA
tcactcttactttggcagtt

SEQ ID NO: 157800 - DNA, 20 bp, synthetic construct
  source 1..20: mol_type = other DNA
gtcactcttactttggcagt

SEQ ID NO: 157801 - DNA, 20 bp, synthetic construct
  source 1..20: mol_type = other DNA
agtcactcttactttggcag

SEQ ID NO: 157802 - DNA, 20 bp, synthetic construct
  source 1..20: mol_type = other DNA
cagtcactcttactttggca

SEQ ID NO: 157803 - DNA, 20 bp, synthetic construct
  source 1..20: mol_type = other DNA
gcagtcactcttactttggc

SEQ ID NO: 157804 - DNA, 20 bp, synthetic construct
  source 1..20: mol_type = other DNA
cgcagtcactcttactttgg

SEQ ID NO: 157805 - DNA, 20 bp, synthetic construct
  source 1..20: mol_type = other DNA
ccgcagtcactcttactttg

SEQ ID NO: 157806 - DNA, 20 bp, synthetic construct
  source 1..20: mol_type = other DNA
tccgcagtcactcttacttt

SEQ ID NO: 157807 - DNA, 20 bp, synthetic construct
  source 1..20: mol_type = other DNA
ttccgcagtcactcttactt

SEQ ID NO: 157808 - DNA, 20 bp, synthetic construct
  source 1..20: mol_type = other DNA
gttccgcagtcactcttact

SEQ ID NO: 157809 - DNA, 20 bp, synthetic construct
  source 1..20: mol_type = other DNA
agttccgcagtcactcttac

SEQ ID NO: 157810 - DNA, 20 bp, synthetic construct
  source 1..20: mol_type = other DNA
tagttccgcagtcactctta

SEQ ID NO: 157811 - DNA, 20 bp, synthetic construct
  source 1..20: mol_type = other DNA
ttagttccgcagtcactctt

SEQ ID NO: 157812 - DNA, 20 bp, synthetic construct
  source 1..20: mol_type = other DNA
cttagttccgcagtcactct

SEQ ID NO: 157813 - DNA, 20 bp, synthetic construct
  source 1..20: mol_type = other DNA
ccttagttccgcagtcactc

SEQ ID NO: 157814 - DNA, 20 bp, synthetic construct
  source 1..20: mol_type = other DNA
accttagttccgcagtcact

SEQ ID NO: 157815 - DNA, 20 bp, synthetic construct
  source 1..20: mol_type = other DNA
aaccttagttccgcagtcac

SEQ ID NO: 157816 - DNA, 20 bp, synthetic construct
  source 1..20: mol_type = other DNA
taaccttagttccgcagtca

SEQ ID NO: 157817 - DNA, 20 bp, synthetic construct
  source 1..20: mol_type = other DNA
gtaaccttagttccgcagtc

SEQ ID NO: 157818 - DNA, 20 bp, synthetic construct
  source 1..20: mol_type = other DNA
agtaaccttagttccgcagt

SEQ ID NO: 157819 - DNA, 20 bp, synthetic construct
  source 1..20: mol_type = other DNA
cagtaaccttagttccgcag

SEQ ID NO: 157820 - DNA, 20 bp, synthetic construct
  source 1..20: mol_type = other DNA
acagtaaccttagttccgca

SEQ ID NO: 157821 - DNA, 20 bp, synthetic construct
  source 1..20: mol_type = other DNA
tacagtaaccttagttccgc

SEQ ID NO: 157822 - DNA, 20 bp, synthetic construct
  source 1..20: mol_type = other DNA
ttacagtaaccttagttccg

SEQ ID NO: 157823 - DNA, 20 bp, synthetic construct
  source 1..20: mol_type = other DNA
gttacagtaaccttagttcc

SEQ ID NO: 157824 - DNA, 20 bp, synthetic construct
  source 1..20: mol_type = other DNA
agttacagtaaccttagttc

SEQ ID NO: 157825 - DNA, 20 bp, synthetic construct
  source 1..20: mol_type = other DNA
aagttacagtaaccttagtt

SEQ ID NO: 157826 - DNA, 20 bp, synthetic construct
  source 1..20: mol_type = other DNA
taagttacagtaaccttagt

SEQ ID NO: 157827 - DNA, 20 bp, synthetic construct
  source 1..20: mol_type = other DNA
gtaagttacagtaaccttag

SEQ ID NO: 157828 - DNA, 20 bp, synthetic construct
  source 1..20: mol_type = other DNA
ggtaagttacagtaacctta

SEQ ID NO: 157829 - DNA, 20 bp, synthetic construct
  source 1..20: mol_type = other DNA
tggtaagttacagtaacctt

SEQ ID NO: 157830 - DNA, 20 bp, synthetic construct
  source 1..20: mol_type = other DNA
atggtaagttacagtaacct

SEQ ID NO: 157831 - DNA, 20 bp, synthetic construct
  source 1..20: mol_type = other DNA
catggtaagttacagtaacc

SEQ ID NO: 157832 - DNA, 20 bp, synthetic construct
  source 1..20: mol_type = other DNA
ccatggtaagttacagtaac

SEQ ID NO: 157833 - DNA, 20 bp, synthetic construct
  source 1..20: mol_type = other DNA
tccatggtaagttacagtaa

SEQ ID NO: 157834 - DNA, 20 bp, synthetic construct
  source 1..20: mol_type = other DNA
ctccatggtaagttacagta

SEQ ID NO: 157835 - DNA, 20 bp, synthetic construct
  source 1..20: mol_type = other DNA
cctccatggtaagttacagt

SEQ ID NO: 157836 - DNA, 20 bp, synthetic construct
  source 1..20: mol_type = other DNA
tcctccatggtaagttacag

SEQ ID NO: 157837 - DNA, 20 bp, synthetic construct
  source 1..20: mol_type = other DNA
atcctccatggtaagttaca

SEQ ID NO: 157838 - DNA, 20 bp, synthetic construct
  source 1..20: mol_type = other DNA
aatcctccatggtaagttac

SEQ ID NO: 157839 - DNA, 20 bp, synthetic construct
  source 1..20: mol_type = other DNA
taatcctccatggtaagtta

SEQ ID NO: 157840 - DNA, 20 bp, synthetic construct
  source 1..20: mol_type = other DNA
ttaatcctccatggtaagtt

SEQ ID NO: 157841 - DNA, 20 bp, synthetic construct
  source 1..20: mol_type = other DNA
cttaatcctccatggtaagt

SEQ ID NO: 157842 - DNA, 20 bp, synthetic construct
  source 1..20: mol_type = other DNA
ccttaatcctccatggtaag

SEQ ID NO: 157843 - DNA, 20 bp, synthetic construct
  source 1..20: mol_type = other DNA
cccttaatcctccatggtaa

SEQ ID NO: 157844 - DNA, 20 bp, synthetic construct
  source 1..20: mol_type = other DNA
acccttaatcctccatggta

SEQ ID NO: 157845 - DNA, 20 bp, synthetic construct
  source 1..20: mol_type = other DNA
tacccttaatcctccatggt

SEQ ID NO: 157846 - DNA, 20 bp, synthetic construct
  source 1..20: mol_type = other DNA
ctacccttaatcctccatgg

SEQ ID NO: 157847 - DNA, 20 bp, synthetic construct
  source 1..20: mol_type = other DNA
gctacccttaatcctccatg

SEQ ID NO: 157848 - DNA, 20 bp, synthetic construct
  source 1..20: mol_type = other DNA
cgctacccttaatcctccat

SEQ ID NO: 157849 - DNA, 20 bp, synthetic construct
  source 1..20: mol_type = other DNA
acgctacccttaatcctcca

SEQ ID NO: 157850 - DNA, 20 bp, synthetic construct
  source 1..20: mol_type = other DNA
cacgctacccttaatcctcc

SEQ ID NO: 157851 - DNA, 20 bp, synthetic construct
  source 1..20: mol_type = other DNA
acacgctacccttaatcctc

SEQ ID NO: 157852 - DNA, 20 bp, synthetic construct
  source 1..20: mol_type = other DNA
cacacgctacccttaatcct

SEQ ID NO: 157853 - DNA, 20 bp, synthetic construct
  source 1..20: mol_type = other DNA
ccacacgctacccttaatcc

SEQ ID NO: 157854 - DNA, 20 bp, synthetic construct
  source 1..20: mol_type = other DNA
accacacgctacccttaatc

SEQ ID NO: 157855 - DNA, 20 bp, synthetic construct
  source 1..20: mol_type = other DNA
caccacacgctacccttaat

SEQ ID NO: 157856 - DNA, 20 bp, synthetic construct
  source 1..20: mol_type = other DNA
ccaccacacgctacccttaa

SEQ ID NO: 157857 - DNA, 20 bp, synthetic construct
  source 1..20: mol_type = other DNA
accaccacacgctaccctta

SEQ ID NO: 157858 - DNA, 20 bp, synthetic construct
  source 1..20: mol_type = other DNA
gaccaccacacgctaccctt

SEQ ID NO: 157859 - DNA, 20 bp, synthetic construct
  source 1..20: mol_type = other DNA
agaccaccacacgctaccct

SEQ ID NO: 157860 - DNA, 20 bp, synthetic construct
  source 1..20: mol_type = other DNA
tagaccaccacacgctaccc

SEQ ID NO: 157861 - DNA, 20 bp, synthetic construct
  source 1..20: mol_type = other DNA
gtagaccaccacacgctacc

SEQ ID NO: 157862 - DNA, 20 bp, synthetic construct
  source 1..20: mol_type = other DNA
tgtagaccaccacacgctac

SEQ ID NO: 157863 - DNA, 20 bp, synthetic construct
  source 1..20: mol_type = other DNA
ttgtagaccaccacacgcta

SEQ ID NO: 157864 - DNA, 20 bp, synthetic construct
  source 1..20: mol_type = other DNA
gttgtagaccaccacacgct

SEQ ID NO: 157865 - DNA, 20 bp, synthetic construct
  source 1..20: mol_type = other DNA
tgttgtagaccaccacacgc

SEQ ID NO: 157866 - DNA, 20 bp, synthetic construct
  source 1..20: mol_type = other DNA
atgttgtagaccaccacacg

SEQ ID NO: 157867 - DNA, 20 bp, synthetic construct
  source 1..20: mol_type = other DNA
tatgttgtagaccaccacac

SEQ ID NO: 157868 - DNA, 20 bp, synthetic construct
  source 1..20: mol_type = other DNA
ctatgttgtagaccaccaca

SEQ ID NO: 157869 - DNA, 20 bp, synthetic construct
  source 1..20: mol_type = other DNA
actatgttgtagaccaccac

SEQ ID NO: 157870 - DNA, 20 bp, synthetic construct
  source 1..20: mol_type = other DNA
aactatgttgtagaccacca

SEQ ID NO: 157871 - DNA, 20 bp, synthetic construct
  source 1..20: mol_type = other DNA
taactatgttgtagaccacc

SEQ ID NO: 157872 - DNA, 20 bp, synthetic construct
  source 1..20: mol_type = other DNA
ataactatgttgtagaccac

SEQ ID NO: 157873 - DNA, 20 bp, synthetic construct
  source 1..20: mol_type = other DNA
aataactatgttgtagacca

SEQ ID NO: 157874 - DNA, 20 bp, synthetic construct
  source 1..20: mol_type = other DNA
aaataactatgttgtagacc

SEQ ID NO: 157875 - DNA, 20 bp, synthetic construct
  source 1..20: mol_type = other DNA
caaataactatgttgtagac

SEQ ID NO: 157876 - DNA, 20 bp, synthetic construct
  source 1..20: mol_type = other DNA
ccaaataactatgttgtaga

SEQ ID NO: 157877 - DNA, 20 bp, synthetic construct
  source 1..20: mol_type = other DNA
cccaaataactatgttgtag

SEQ ID NO: 157878 - DNA, 20 bp, synthetic construct
  source 1..20: mol_type = other DNA
acccaaataactatgttgta

SEQ ID NO: 157879 - DNA, 20 bp, synthetic construct
  source 1..20: mol_type = other DNA
aacccaaataactatgttgt

SEQ ID NO: 157880 - DNA, 20 bp, synthetic construct
  source 1..20: mol_type = other DNA
aaacccaaataactatgttg

SEQ ID NO: 157881 - DNA, 20 bp, synthetic construct
  source 1..20: mol_type = other DNA
aaaacccaaataactatgtt

SEQ ID NO: 157882 - DNA, 20 bp, synthetic construct
  source 1..20: mol_type = other DNA
taaaacccaaataactatgt

SEQ ID NO: 157883 - DNA, 20 bp, synthetic construct
  source 1..20: mol_type = other DNA
ctaaaacccaaataactatg

SEQ ID NO: 157884 - DNA, 20 bp, synthetic construct
  source 1..20: mol_type = other DNA
actaaaacccaaataactat

SEQ ID NO: 157885 - DNA, 20 bp, synthetic construct
  source 1..20: mol_type = other DNA
tactaaaacccaaataacta

SEQ ID NO: 157886 - DNA, 20 bp, synthetic construct
  source 1..20: mol_type = other DNA
atactaaaacccaaataact

SEQ ID NO: 157887 - DNA, 20 bp, synthetic construct
  source 1..20: mol_type = other DNA
aatactaaaacccaaataac

SEQ ID NO: 157888 - DNA, 20 bp, synthetic construct
  source 1..20: mol_type = other DNA
aaatactaaaacccaaataa

SEQ ID NO: 157889 - DNA, 20 bp, synthetic construct
  source 1..20: mol_type = other DNA
gaaatactaaaacccaaata

SEQ ID NO: 157890 - DNA, 20 bp, synthetic construct
  source 1..20: mol_type = other DNA
tgaaatactaaaacccaaat

SEQ ID NO: 157891 - DNA, 20 bp, synthetic construct
  source 1..20: mol_type = other DNA
atgaaatactaaaacccaaa

SEQ ID NO: 157892 - DNA, 20 bp, synthetic construct
  source 1..20: mol_type = other DNA
aatgaaatactaaaacccaa

SEQ ID NO: 157893 - DNA, 20 bp, synthetic construct
  source 1..20: mol_type = other DNA
aaatgaaatactaaaaccca

SEQ ID NO: 157894 - DNA, 20 bp, synthetic construct
  source 1..20: mol_type = other DNA
taaatgaaatactaaaaccc

SEQ ID NO: 157895 - DNA, 20 bp, synthetic construct
  source 1..20: mol_type = other DNA
ctaaatgaaatactaaaacc

SEQ ID NO: 157896 - DNA, 20 bp, synthetic construct
  source 1..20: mol_type = other DNA
tctaaatgaaatactaaaac

SEQ ID NO: 157897 - DNA, 20 bp, synthetic construct
  source 1..20: mol_type = other DNA
gtctaaatgaaatactaaaa

SEQ ID NO: 157898 - DNA, 20 bp, synthetic construct
  source 1..20: mol_type = other DNA
tgtctaaatgaaatactaaa

SEQ ID NO: 157899 - DNA, 20 bp, synthetic construct
  source 1..20: mol_type = other DNA
ctgtctaaatgaaatactaa

SEQ ID NO: 157900 - DNA, 20 bp, synthetic construct
  source 1..20: mol_type = other DNA
gctgtctaaatgaaatacta

SEQ ID NO: 157901 - DNA, 20 bp, synthetic construct
  source 1..20: mol_type = other DNA
tgctgtctaaatgaaatact

SEQ ID NO: 157902 - DNA, 20 bp, synthetic construct
  source 1..20: mol_type = other DNA
ttgctgtctaaatgaaatac

SEQ ID NO: 157903 - DNA, 20 bp, synthetic construct
  source 1..20: mol_type = other DNA
gttgctgtctaaatgaaata

SEQ ID NO: 157904 - DNA, 20 bp, synthetic construct
  source 1..20: mol_type = other DNA
tgttgctgtctaaatgaaat

SEQ ID NO: 157905 - DNA, 20 bp, synthetic construct
  source 1..20: mol_type = other DNA
gtgttgctgtctaaatgaaa

SEQ ID NO: 157906 - DNA, 20 bp, synthetic construct
  source 1..20: mol_type = other DNA
agtgttgctgtctaaatgaa

SEQ ID NO: 157907 - DNA, 20 bp, synthetic construct
  source 1..20: mol_type = other DNA
aagtgttgctgtctaaatga

SEQ ID NO: 157908 - DNA, 20 bp, synthetic construct
  source 1..20: mol_type = other DNA
taagtgttgctgtctaaatg

SEQ ID NO: 157909 - DNA, 20 bp, synthetic construct
  source 1..20: mol_type = other DNA
gtaagtgttgctgtctaaat

SEQ ID NO: 157910 - DNA, 20 bp, synthetic construct
  source 1..20: mol_type = other DNA
ggtaagtgttgctgtctaaa

SEQ ID NO: 157911 - DNA, 20 bp, synthetic construct
  source 1..20: mol_type = other DNA
aggtaagtgttgctgtctaa

SEQ ID NO: 157912 - DNA, 20 bp, synthetic construct
  source 1..20: mol_type = other DNA
taggtaagtgttgctgtcta

SEQ ID NO: 157913 - DNA, 20 bp, synthetic construct
  source 1..20: mol_type = other DNA
ttaggtaagtgttgctgtct

SEQ ID NO: 157914 - DNA, 20 bp, synthetic construct
  source 1..20: mol_type = other DNA
attaggtaagtgttgctgtc

SEQ ID NO: 157915 - DNA, 20 bp, synthetic construct
  source 1..20: mol_type = other DNA
cattaggtaagtgttgctgt

SEQ ID NO: 157916 - DNA, 20 bp, synthetic construct
  source 1..20: mol_type = other DNA
acattaggtaagtgttgctg

SEQ ID NO: 157917 - DNA, 20 bp, synthetic construct
  source 1..20: mol_type = other DNA
aacattaggtaagtgttgct

SEQ ID NO: 157918 - DNA, 20 bp, synthetic construct
  source 1..20: mol_type = other DNA
aaacattaggtaagtgttgc

SEQ ID NO: 157919 - DNA, 20 bp, synthetic construct
  source 1..20: mol_type = other DNA
taaacattaggtaagtgttg

SEQ ID NO: 157920 - DNA, 20 bp, synthetic construct
  source 1..20: mol_type = other DNA
ttaaacattaggtaagtgtt

SEQ ID NO: 157921 - DNA, 20 bp, synthetic construct
  source 1..20: mol_type = other DNA
tttaaacattaggtaagtgt

SEQ ID NO: 157922 - DNA, 20 bp, synthetic construct
  source 1..20: mol_type = other DNA
ctttaaacattaggtaagtg

SEQ ID NO: 157923 - DNA, 20 bp, synthetic construct
  source 1..20: mol_type = other DNA
cctttaaacattaggtaagt

SEQ ID NO: 157924 - DNA, 20 bp, synthetic construct
  source 1..20: mol_type = other DNA
acctttaaacattaggtaag

SEQ ID NO: 157925 - DNA, 20 bp, synthetic construct
  source 1..20: mol_type = other DNA
tacctttaaacattaggtaa

SEQ ID NO: 157926 - DNA, 20 bp, synthetic construct
  source 1..20: mol_type = other DNA
ttacctttaaacattaggta

SEQ ID NO: 157927 - DNA, 20 bp, synthetic construct
  source 1..20: mol_type = other DNA
attacctttaaacattaggt

SEQ ID NO: 157928 - DNA, 20 bp, synthetic construct
  source 1..20: mol_type = other DNA
cattacctttaaacattagg

SEQ ID NO: 157929 - DNA, 20 bp, synthetic construct
  source 1..20: mol_type = other DNA
acattacctttaaacattag

SEQ ID NO: 157930 - DNA, 20 bp, synthetic construct
  source 1..20: mol_type = other DNA
gacattacctttaaacatta

SEQ ID NO: 157931 - DNA, 20 bp, synthetic construct
  source 1..20: mol_type = other DNA
agacattacctttaaacatt

SEQ ID NO: 157932 - DNA, 20 bp, synthetic construct
  source 1..20: mol_type = other DNA
aagacattacctttaaacat

SEQ ID NO: 157933 - DNA, 20 bp, synthetic construct
  source 1..20: mol_type = other DNA
aaagacattacctttaaaca

SEQ ID NO: 157934 - DNA, 20 bp, synthetic construct
  source 1..20: mol_type = other DNA
caaagacattacctttaaac

SEQ ID NO: 157935 - DNA, 20 bp, synthetic construct
  source 1..20: mol_type = other DNA
gcaaagacattacctttaaa

SEQ ID NO: 157936 - DNA, 20 bp, synthetic construct
  source 1..20: mol_type = other DNA
tgcaaagacattacctttaa

SEQ ID NO: 157937 - DNA, 20 bp, synthetic construct
  source 1..20: mol_type = other DNA
ttgcaaagacattaccttta

SEQ ID NO: 157938 - DNA, 20 bp, synthetic construct
  source 1..20: mol_type = other DNA
gttgcaaagacattaccttt

SEQ ID NO: 157939 - DNA, 20 bp, synthetic construct
  source 1..20: mol_type = other DNA
tgttgcaaagacattacctt

SEQ ID NO: 157940 - DNA, 20 bp, synthetic construct
  source 1..20: mol_type = other DNA
gtgttgcaaagacattacct

SEQ ID NO: 157941 - DNA, 20 bp, synthetic construct
  source 1..20: mol_type = other DNA
ggtgttgcaaagacattacc

SEQ ID NO: 157942 - DNA, 20 bp, synthetic construct
  source 1..20: mol_type = other DNA
tggtgttgcaaagacattac

SEQ ID NO: 157943 - DNA, 20 bp, synthetic construct
  source 1..20: mol_type = other DNA
ttggtgttgcaaagacatta

SEQ ID NO: 157944 - DNA, 20 bp, synthetic construct
  source 1..20: mol_type = other DNA
cttggtgttgcaaagacatt

SEQ ID NO: 157945 - DNA, 20 bp, synthetic construct
  source 1..20: mol_type = other DNA
tcttggtgttgcaaagacat

SEQ ID NO: 157946 - DNA, 20 bp, synthetic construct
  source 1..20: mol_type = other DNA
ttcttggtgttgcaaagaca

SEQ ID NO: 157947 - DNA, 20 bp, synthetic construct
  source 1..20: mol_type = other DNA
tttcttggtgttgcaaagac

SEQ ID NO: 157948 - DNA, 20 bp, synthetic construct
  source 1..20: mol_type = other DNA
ttttcttggtgttgcaaaga

SEQ ID NO: 157949 - DNA, 20 bp, synthetic construct
  source 1..20: mol_type = other DNA
tttttcttggtgttgcaaag

SEQ ID NO: 157950 - DNA, 20 bp, synthetic construct
  source 1..20: mol_type = other DNA
ctttttcttggtgttgcaaa

SEQ ID NO: 157951 - DNA, 20 bp, synthetic construct
  source 1..20: mol_type = other DNA
gctttttcttggtgttgcaa

SEQ ID NO: 157952 - DNA, 20 bp, synthetic construct
  source 1..20: mol_type = other DNA
agctttttcttggtgttgca

SEQ ID NO: 157953 - DNA, 20 bp, synthetic construct
  source 1..20: mol_type = other DNA
aagctttttcttggtgttgc

SEQ ID NO: 157954 - DNA, 20 bp, synthetic construct
  source 1..20: mol_type = other DNA
aaagctttttcttggtgttg

SEQ ID NO: 157955 - DNA, 20 bp, synthetic construct
  source 1..20: mol_type = other DNA
caaagctttttcttggtgtt

SEQ ID NO: 157956 - DNA, 20 bp, synthetic construct
  source 1..20: mol_type = other DNA
tcaaagctttttcttggtgt

SEQ ID NO: 157957 - DNA, 20 bp, synthetic construct
  source 1..20: mol_type = other DNA
ctcaaagctttttcttggtg

SEQ ID NO: 157958 - DNA, 20 bp, synthetic construct
  source 1..20: mol_type = other DNA
actcaaagctttttcttggt

SEQ ID NO: 157959 - DNA, 20 bp, synthetic construct
  source 1..20: mol_type = other DNA
tactcaaagctttttcttgg

SEQ ID NO: 157960 - DNA, 20 bp, synthetic construct
  source 1..20: mol_type = other DNA
ctactcaaagctttttcttg

SEQ ID NO: 157961 - DNA, 20 bp, synthetic construct
  source 1..20: mol_type = other DNA
actactcaaagctttttctt

SEQ ID NO: 157962 - DNA, 20 bp, synthetic construct
  source 1..20: mol_type = other DNA
tactactcaaagctttttct

SEQ ID NO: 157963 - DNA, 20 bp, synthetic construct
  source 1..20: mol_type = other DNA
ctactactcaaagctttttc

SEQ ID NO: 157964 - DNA, 20 bp, synthetic construct
  source 1..20: mol_type = other DNA
actactactcaaagcttttt

SEQ ID NO: 157965 - DNA, 20 bp, synthetic construct
  source 1..20: mol_type = other DNA
aactactactcaaagctttt

SEQ ID NO: 157966 - DNA, 20 bp, synthetic construct
  source 1..20: mol_type = other DNA
aaactactactcaaagcttt

SEQ ID NO: 157967 - DNA, 20 bp, synthetic construct
  source 1..20: mol_type = other DNA
gaaactactactcaaagctt

SEQ ID NO: 157968 - DNA, 20 bp, synthetic construct
  source 1..20: mol_type = other DNA
agaaactactactcaaagct

SEQ ID NO: 157969 - DNA, 20 bp, synthetic construct
  source 1..20: mol_type = other DNA
tagaaactactactcaaagc

SEQ ID NO: 157970 - DNA, 20 bp, synthetic construct
  source 1..20: mol_type = other DNA
gtagaaactactactcaaag

SEQ ID NO: 157971 - DNA, 20 bp, synthetic construct
  source 1..20: mol_type = other DNA
agtagaaactactactcaaa

SEQ ID NO: 157972 - DNA, 20 bp, synthetic construct
  source 1..20: mol_type = other DNA
aagtagaaactactactcaa

SEQ ID NO: 157973 - DNA, 20 bp, synthetic construct
  source 1..20: mol_type = other DNA
aaagtagaaactactactca

SEQ ID NO: 157974 - DNA, 20 bp, synthetic construct
  source 1..20: mol_type = other DNA
aaaagtagaaactactactc

SEQ ID NO: 157975 - DNA, 20 bp, synthetic construct
  source 1..20: mol_type = other DNA
taaaagtagaaactactact

SEQ ID NO: 157976 - DNA, 20 bp, synthetic construct
  source 1..20: mol_type = other DNA
ttaaaagtagaaactactac

SEQ ID NO: 157977 - DNA, 20 bp, synthetic construct
  source 1..20: mol_type = other DNA
tttaaaagtagaaactacta

SEQ ID NO: 157978 - DNA, 20 bp, synthetic construct
  source 1..20: mol_type = other DNA
gtttaaaagtagaaactact

SEQ ID NO: 157979 - DNA, 20 bp, synthetic construct
  source 1..20: mol_type = other DNA
agtttaaaagtagaaactac

SEQ ID NO: 157980 - DNA, 20 bp, synthetic construct
  source 1..20: mol_type = other DNA
tagtttaaaagtagaaacta

SEQ ID NO: 157981 - DNA, 20 bp, synthetic construct
  source 1..20: mol_type = other DNA
gtagtttaaaagtagaaact

SEQ ID NO: 157982 - DNA, 20 bp, synthetic construct
  source 1..20: mol_type = other DNA
agtagtttaaaagtagaaac

SEQ ID NO: 157983 - DNA, 20 bp, synthetic construct
  source 1..20: mol_type = other DNA
tagtagtttaaaagtagaaa

SEQ ID NO: 157984 - DNA, 20 bp, synthetic construct
  source 1..20: mol_type = other DNA
ttagtagtttaaaagtagaa

SEQ ID NO: 157985 - DNA, 20 bp, synthetic construct
  source 1..20: mol_type = other DNA
tttagtagtttaaaagtaga

SEQ ID NO: 157986 - DNA, 20 bp, synthetic construct
  source 1..20: mol_type = other DNA
atttagtagtttaaaagtag

SEQ ID NO: 157987 - DNA, 20 bp, synthetic construct
  source 1..20: mol_type = other DNA
tatttagtagtttaaaagta

SEQ ID NO: 157988 - DNA, 20 bp, synthetic construct
  source 1..20: mol_type = other DNA
atatttagtagtttaaaagt

SEQ ID NO: 157989 - DNA, 20 bp, synthetic construct
  source 1..20: mol_type = other DNA
aatatttagtagtttaaaag

SEQ ID NO: 157990 - DNA, 20 bp, synthetic construct
  source 1..20: mol_type = other DNA
taatatttagtagtttaaaa

SEQ ID NO: 157991 - DNA, 20 bp, synthetic construct
  source 1..20: mol_type = other DNA
ctaatatttagtagtttaaa

SEQ ID NO: 157992 - DNA, 20 bp, synthetic construct
  source 1..20: mol_type = other DNA
actaatatttagtagtttaa

SEQ ID NO: 157993 - DNA, 20 bp, synthetic construct
  source 1..20: mol_type = other DNA
tactaatatttagtagttta

SEQ ID NO: 157994 - DNA, 20 bp, synthetic construct
  source 1..20: mol_type = other DNA
atactaatatttagtagttt

SEQ ID NO: 157995 - DNA, 20 bp, synthetic construct
  source 1..20: mol_type = other DNA
tatactaatatttagtagtt

SEQ ID NO: 157996 - DNA, 20 bp, synthetic construct
  source 1..20: mol_type = other DNA
atatactaatatttagtagt

SEQ ID NO: 157997 - DNA, 20 bp, synthetic construct
  source 1..20: mol_type = other DNA
gatatactaatatttagtag

SEQ ID NO: 157998 - DNA, 20 bp, synthetic construct
  source 1..20: mol_type = other DNA
agatatactaatatttagta

SEQ ID NO: 157999 - DNA, 20 bp, synthetic construct
  source 1..20: mol_type = other DNA
gagatatactaatatttagt

SEQ ID NO: 158000 - DNA, 20 bp, synthetic construct
  source 1..20: mol_type = other DNA
agagatatactaatatttag

SEQ ID NO: 158001 - DNA, 20 bp, synthetic construct
  source 1..20: mol_type = other DNA
gagagatatactaatattta

SEQ ID NO: 158002 - DNA, 20 bp, synthetic construct
  source 1..20: mol_type = other DNA
agagagatatactaatattt

SEQ ID NO: 158003 - DNA, 20 bp, synthetic construct
  source 1..20: mol_type = other DNA
tagagagatatactaatatt

SEQ ID NO: 158004 - DNA, 20 bp, synthetic construct
  source 1..20: mol_type = other DNA
gtagagagatatactaatat

SEQ ID NO: 158005 - DNA, 20 bp, synthetic construct
  source 1..20: mol_type = other DNA
agtagagagatatactaata

SEQ ID NO: 158006 - DNA, 20 bp, synthetic construct
  source 1..20: mol_type = other DNA
tagtagagagatatactaat

SEQ ID NO: 158007 - DNA, 20 bp, synthetic construct
  source 1..20: mol_type = other DNA
ctagtagagagatatactaa

SEQ ID NO: 158008 - DNA, 20 bp, synthetic construct
  source 1..20: mol_type = other DNA
cctagtagagagatatacta

SEQ ID NO: 158009 - DNA, 20 bp, synthetic construct
  source 1..20: mol_type = other DNA
tcctagtagagagatatact

SEQ ID NO: 158010 - DNA, 20 bp, synthetic construct
  source 1..20: mol_type = other DNA
atcctagtagagagatatac

SEQ ID NO: 158011 - DNA, 20 bp, synthetic construct
  source 1..20: mol_type = other DNA
aatcctagtagagagatata

SEQ ID NO: 158012 - DNA, 20 bp, synthetic construct
  source 1..20: mol_type = other DNA
taatcctagtagagagatat

SEQ ID NO: 158013 - DNA, 20 bp, synthetic construct
  source 1..20: mol_type = other DNA
ttaatcctagtagagagata

SEQ ID NO: 158014 - DNA, 20 bp, synthetic construct
  source 1..20: mol_type = other DNA
attaatcctagtagagagat

SEQ ID NO: 158015 - DNA, 20 bp, synthetic construct
  source 1..20: mol_type = other DNA
cattaatcctagtagagaga

SEQ ID NO: 158016 - DNA, 20 bp, synthetic construct
  source 1..20: mol_type = other DNA
acattaatcctagtagagag

SEQ ID NO: 158017 - DNA, 20 bp, synthetic construct
  source 1..20: mol_type = other DNA
aacattaatcctagtagaga

SEQ ID NO: 158018 - DNA, 20 bp, synthetic construct
  source 1..20: mol_type = other DNA
taacattaatcctagtagag

SEQ ID NO: 158019 - DNA, 20 bp, synthetic construct
  source 1..20: mol_type = other DNA
ataacattaatcctagtaga

SEQ ID NO: 158020 - DNA, 20 bp, synthetic construct
  source 1..20: mol_type = other DNA
aataacattaatcctagtag

SEQ ID NO: 158021 - DNA, 20 bp, synthetic construct
  source 1..20: mol_type = other DNA
aaataacattaatcctagta

SEQ ID NO: 158022 - DNA, 20 bp, synthetic construct
  source 1..20: mol_type = other DNA
aaaataacattaatcctagt

SEQ ID NO: 158023 - DNA, 20 bp, synthetic construct
  source 1..20: mol_type = other DNA
aaaaataacattaatcctag

SEQ ID NO: 158024 - DNA, 20 bp, synthetic construct
  source 1..20: mol_type = other DNA
gaaaaataacattaatccta

SEQ ID NO: 158025 - DNA, 20 bp, synthetic construct
  source 1..20: mol_type = other DNA
agaaaaataacattaatcct

SEQ ID NO: 158026 - DNA, 20 bp, synthetic construct
  source 1..20: mol_type = other DNA
tagaaaaataacattaatcc

SEQ ID NO: 158027 - DNA, 20 bp, synthetic construct
  source 1..20: mol_type = other DNA
ttagaaaaataacattaatc

SEQ ID NO: 158028 - DNA, 20 bp, synthetic construct
  source 1..20: mol_type = other DNA
attagaaaaataacattaat

SEQ ID NO: 158029 - DNA, 20 bp, synthetic construct
  source 1..20: mol_type = other DNA
tattagaaaaataacattaa

SEQ ID NO: 158030 - DNA, 20 bp, synthetic construct
  source 1..20: mol_type = other DNA
atattagaaaaataacatta

SEQ ID NO: 158031 - DNA, 20 bp, synthetic construct
  source 1..20: mol_type = other DNA
aatattagaaaaataacatt

SEQ ID NO: 158032 - DNA, 20 bp, synthetic construct
  source 1..20: mol_type = other DNA
taatattagaaaaataacat

SEQ ID NO: 158033 - DNA, 20 bp, synthetic construct
  source 1..20: mol_type = other DNA
ataatattagaaaaataaca

SEQ ID NO: 158034 - DNA, 20 bp, synthetic construct
  source 1..20: mol_type = other DNA
cataatattagaaaaataac

SEQ ID NO: 158035 - DNA, 20 bp, synthetic construct
  source 1..20: mol_type = other DNA
tcataatattagaaaaataa

SEQ ID NO: 158036 - DNA, 20 bp, synthetic construct
  source 1..20: mol_type = other DNA
ctcataatattagaaaaata

SEQ ID NO: 158037 - DNA, 20 bp, synthetic construct
  source 1..20: mol_type = other DNA
cctcataatattagaaaaat

SEQ ID NO: 158038 - DNA, 20 bp, synthetic construct
  source 1..20: mol_type = other DNA
acctcataatattagaaaaa

SEQ ID NO: 158039 - DNA, 20 bp, synthetic construct
  source 1..20: mol_type = other DNA
aacctcataatattagaaaa

SEQ ID NO: 158040 - DNA, 20 bp, synthetic construct
  source 1..20: mol_type = other DNA
gaacctcataatattagaaa

SEQ ID NO: 158041 - DNA, 20 bp, synthetic construct
  source 1..20: mol_type = other DNA
agaacctcataatattagaa

SEQ ID NO: 158042 - DNA, 20 bp, synthetic construct
  source 1..20: mol_type = other DNA
aagaacctcataatattaga

SEQ ID NO: 158043 - DNA, 20 bp, synthetic construct
  source 1..20: mol_type = other DNA
taagaacctcataatattag

SEQ ID NO: 158044 - DNA, 20 bp, synthetic construct
  source 1..20: mol_type = other DNA
ttaagaacctcataatatta

SEQ ID NO: 158045 - DNA, 20 bp, synthetic construct
  source 1..20: mol_type = other DNA
tttaagaacctcataatatt

SEQ ID NO: 158046 - DNA, 20 bp, synthetic construct
  source 1..20: mol_type = other DNA
gtttaagaacctcataatat

SEQ ID NO: 158047 - DNA, 20 bp, synthetic construct
  source 1..20: mol_type = other DNA
tgtttaagaacctcataata

SEQ ID NO: 158048 - DNA, 20 bp, synthetic construct
  source 1..20: mol_type = other DNA
atgtttaagaacctcataat

SEQ ID NO: 158049 - DNA, 20 bp, synthetic construct
  source 1..20: mol_type = other DNA
gatgtttaagaacctcataa

SEQ ID NO: 158050 - DNA, 20 bp, synthetic construct
  source 1..20: mol_type = other DNA
agatgtttaagaacctcata

SEQ ID NO: 158051 - DNA, 20 bp, synthetic construct
  source 1..20: mol_type = other DNA
aagatgtttaagaacctcat

SEQ ID NO: 158052 - DNA, 20 bp, synthetic construct
  source 1..20: mol_type = other DNA
aaagatgtttaagaacctca

SEQ ID NO: 158053 - DNA, 20 bp, synthetic construct
  source 1..20: mol_type = other DNA
aaaagatgtttaagaacctc

SEQ ID NO: 158054 - DNA, 20 bp, synthetic construct
  source 1..20: mol_type = other DNA
caaaagatgtttaagaacct

SEQ ID NO: 158055 - DNA, 20 bp, synthetic construct
  source 1..20: mol_type = other DNA
ccaaaagatgtttaagaacc

SEQ ID NO: 158056 - DNA, 20 bp, synthetic construct
  source 1..20: mol_type = other DNA
cccaaaagatgtttaagaac

SEQ ID NO: 158057 - DNA, 20 bp, synthetic construct
  source 1..20: mol_type = other DNA
acccaaaagatgtttaagaa

SEQ ID NO: 158058 - DNA, 20 bp, synthetic construct
  source 1..20: mol_type = other DNA
tacccaaaagatgtttaaga

SEQ ID NO: 158059 - DNA, 20 bp, synthetic construct
  source 1..20: mol_type = other DNA
atacccaaaagatgtttaag

SEQ ID NO: 158060 - DNA, 20 bp, synthetic construct
  source 1..20: mol_type = other DNA
aatacccaaaagatgtttaa

SEQ ID NO: 158061 - DNA, 20 bp, synthetic construct
  source 1..20: mol_type = other DNA
caatacccaaaagatgttta

SEQ ID NO: 158062 - DNA, 20 bp, synthetic construct
  source 1..20: mol_type = other DNA
acaatacccaaaagatgttt

SEQ ID NO: 158063 - DNA, 20 bp, synthetic construct
  source 1..20: mol_type = other DNA
aacaatacccaaaagatgtt

SEQ ID NO: 158064 - DNA, 20 bp, synthetic construct
  source 1..20: mol_type = other DNA
caacaatacccaaaagatgt

SEQ ID NO: 158065 - DNA, 20 bp, synthetic construct
  source 1..20: mol_type = other DNA
ccaacaatacccaaaagatg

SEQ ID NO: 158066 - DNA, 20 bp, synthetic construct
  source 1..20: mol_type = other DNA
cccaacaatacccaaaagat

SEQ ID NO: 158067 - DNA, 20 bp, synthetic construct
  source 1..20: mol_type = other DNA
tcccaacaatacccaaaaga

SEQ ID NO: 158068 - DNA, 20 bp, synthetic construct
  source 1..20: mol_type = other DNA
ctcccaacaatacccaaaag

SEQ ID NO: 158069 - DNA, 20 bp, synthetic construct
  source 1..20: mol_type = other DNA
cctcccaacaatacccaaaa

SEQ ID NO: 158070 - DNA, 20 bp, synthetic construct
  source 1..20: mol_type = other DNA
tcctcccaacaatacccaaa

SEQ ID NO: 158071 - DNA, 20 bp, synthetic construct
  source 1..20: mol_type = other DNA
ctcctcccaacaatacccaa

SEQ ID NO: 158072 - DNA, 20 bp, synthetic construct
  source 1..20: mol_type = other DNA
cctcctcccaacaataccca

SEQ ID NO: 158073 - DNA, 20 bp, synthetic construct
  source 1..20: mol_type = other DNA
acctcctcccaacaataccc

SEQ ID NO: 158074 - DNA, 20 bp, synthetic construct
  source 1..20: mol_type = other DNA
tacctcctcccaacaatacc

SEQ ID NO: 158075 - DNA, 20 bp, synthetic construct
  source 1..20: mol_type = other DNA
ctacctcctcccaacaatac

SEQ ID NO: 158076 - DNA, 20 bp, synthetic construct
  source 1..20: mol_type = other DNA
actacctcctcccaacaata

SEQ ID NO: 158077 - DNA, 20 bp, synthetic construct
  source 1..20: mol_type = other DNA
cactacctcctcccaacaat

SEQ ID NO: 158078 - DNA, 20 bp, synthetic construct
  source 1..20: mol_type = other DNA
tcactacctcctcccaacaa

SEQ ID NO: 158079 - DNA, 20 bp, synthetic construct
  source 1..20: mol_type = other DNA
atcactacctcctcccaaca

SEQ ID NO: 158080 - DNA, 20 bp, synthetic construct
  source 1..20: mol_type = other DNA
aatcactacctcctcccaac

SEQ ID NO: 158081 - DNA, 20 bp, synthetic construct
  source 1..20: mol_type = other DNA
taatcactacctcctcccaa

SEQ ID NO: 158082 - DNA, 20 bp, synthetic construct
  source 1..20: mol_type = other DNA
gtaatcactacctcctccca

SEQ ID NO: 158083 - DNA, 20 bp, synthetic construct
  source 1..20: mol_type = other DNA
agtaatcactacctcctccc

SEQ ID NO: 158084 - DNA, 20 bp, synthetic construct
  source 1..20: mol_type = other DNA
aagtaatcactacctcctcc

SEQ ID NO: 158085 - DNA, 20 bp, synthetic construct
  source 1..20: mol_type = other DNA
caagtaatcactacctcctc

SEQ ID NO: 158086 - DNA, 20 bp, synthetic construct
  source 1..20: mol_type = other DNA
tcaagtaatcactacctcct

SEQ ID NO: 158087 - DNA, 20 bp, synthetic construct
  source 1..20: mol_type = other DNA
gtcaagtaatcactacctcc

SEQ ID NO: 158088 - DNA, 20 bp, synthetic construct
  source 1..20: mol_type = other DNA
tgtcaagtaatcactacctc

SEQ ID NO: 158089 - DNA, 20 bp, synthetic construct
  source 1..20: mol_type = other DNA
ctgtcaagtaatcactacct

SEQ ID NO: 158090 - DNA, 20 bp, synthetic construct
  source 1..20: mol_type = other DNA
gctgtcaagtaatcactacc

SEQ ID NO: 158091 - DNA, 20 bp, synthetic construct
  source 1..20: mol_type = other DNA
ggctgtcaagtaatcactac

SEQ ID NO: 158092 - DNA, 20 bp, synthetic construct
  source 1..20: mol_type = other DNA
gggctgtcaagtaatcacta

SEQ ID NO: 158093 - DNA, 20 bp, synthetic construct
  source 1..20: mol_type = other DNA
tgggctgtcaagtaatcact

SEQ ID NO: 158094 - DNA, 20 bp, synthetic construct
  source 1..20: mol_type = other DNA
ttgggctgtcaagtaatcac

SEQ ID NO: 158095 - DNA, 20 bp, synthetic construct
  source 1..20: mol_type = other DNA
tttgggctgtcaagtaatca

SEQ ID NO: 158096 - DNA, 20 bp, synthetic construct
  source 1..20: mol_type = other DNA
ctttgggctgtcaagtaatc

SEQ ID NO: 158097 - DNA, 20 bp, synthetic construct
  source 1..20: mol_type = other DNA
actttgggctgtcaagtaat

SEQ ID NO: 158098 - DNA, 20 bp, synthetic construct
  source 1..20: mol_type = other DNA
aactttgggctgtcaagtaa

SEQ ID NO: 158099 - DNA, 20 bp, synthetic construct
  source 1..20: mol_type = other DNA
taactttgggctgtcaagta

SEQ ID NO: 158100 - DNA, 20 bp, synthetic construct
  source 1..20: mol_type = other DNA
ataactttgggctgtcaagt

SEQ ID NO: 158101 - DNA, 20 bp, synthetic construct
  source 1..20: mol_type = other DNA
gataactttgggctgtcaag

SEQ ID NO: 158102 - DNA, 20 bp, synthetic construct
  source 1..20: mol_type = other DNA
agataactttgggctgtcaa

SEQ ID NO: 158103 - DNA, 20 bp, synthetic construct
  source 1..20: mol_type = other DNA
aagataactttgggctgtca

SEQ ID NO: 158104 - DNA, 20 bp, synthetic construct
  source 1..20: mol_type = other DNA
gaagataactttgggctgtc

SEQ ID NO: 158105 - DNA, 20 bp, synthetic construct
  source 1..20: mol_type = other DNA
agaagataactttgggctgt

SEQ ID NO: 158106 - DNA, 20 bp, synthetic construct
  source 1..20: mol_type = other DNA
aagaagataactttgggctg

SEQ ID NO: 158107 - DNA, 20 bp, synthetic construct
  source 1..20: mol_type = other DNA
taagaagataactttgggct

SEQ ID NO: 158108 - DNA, 20 bp, synthetic construct
  source 1..20: mol_type = other DNA
ttaagaagataactttgggc

SEQ ID NO: 158109 - DNA, 20 bp, synthetic construct
  source 1..20: mol_type = other DNA
tttaagaagataactttggg

SEQ ID NO: 158110 - DNA, 20 bp, synthetic construct
  source 1..20: mol_type = other DNA
ttttaagaagataactttgg

SEQ ID NO: 158111 - DNA, 20 bp, synthetic construct
  source 1..20: mol_type = other DNA
attttaagaagataactttg

SEQ ID NO: 158112 - DNA, 20 bp, synthetic construct
  source 1..20: mol_type = other DNA
aattttaagaagataacttt

SEQ ID NO: 158113 - DNA, 20 bp, synthetic construct
  source 1..20: mol_type = other DNA
aaattttaagaagataactt

SEQ ID NO: 158114 - DNA, 20 bp, synthetic construct
  source 1..20: mol_type = other DNA
aaaattttaagaagataact

SEQ ID NO: 158115 - DNA, 20 bp, synthetic construct
  source 1..20: mol_type = other DNA
aaaaattttaagaagataac

SEQ ID NO: 158116 - DNA, 20 bp, synthetic construct
  source 1..20: mol_type = other DNA
aaaaaattttaagaagataa

SEQ ID NO: 158117 - DNA, 20 bp, synthetic construct
  source 1..20: mol_type = other DNA
taaaaaattttaagaagata

SEQ ID NO: 158118 - DNA, 20 bp, synthetic construct
  source 1..20: mol_type = other DNA
gtaaaaaattttaagaagat

SEQ ID NO: 158119 - DNA, 20 bp, synthetic construct
  source 1..20: mol_type = other DNA
tgtaaaaaattttaagaaga

SEQ ID NO: 158120 - DNA, 20 bp, synthetic construct
  source 1..20: mol_type = other DNA
ctgtaaaaaattttaagaag

SEQ ID NO: 158121 - DNA, 20 bp, synthetic construct
  source 1..20: mol_type = other DNA
cctgtaaaaaattttaagaa

SEQ ID NO: 158122 - DNA, 20 bp, synthetic construct
  source 1..20: mol_type = other DNA
acctgtaaaaaattttaaga

SEQ ID NO: 158123 - DNA, 20 bp, synthetic construct
  source 1..20: mol_type = other DNA
gacctgtaaaaaattttaag

SEQ ID NO: 158124 - DNA, 20 bp, synthetic construct
  source 1..20: mol_type = other DNA
ggacctgtaaaaaattttaa

SEQ ID NO: 158125 - DNA, 20 bp, synthetic construct
  source 1..20: mol_type = other DNA
tggacctgtaaaaaatttta

SEQ ID NO: 158126 - DNA, 20 bp, synthetic construct
  source 1..20: mol_type = other DNA
atggacctgtaaaaaatttt

SEQ ID NO: 158127 - DNA, 20 bp, synthetic construct
  source 1..20: mol_type = other DNA
catggacctgtaaaaaattt

SEQ ID NO: 158128 - DNA, 20 bp, synthetic construct
  source 1..20: mol_type = other DNA
tcatggacctgtaaaaaatt

SEQ ID NO: 158129 - DNA, 20 bp, synthetic construct
  source 1..20: mol_type = other DNA
ttcatggacctgtaaaaaat

SEQ ID NO: 158130 - DNA, 20 bp, synthetic construct
  source 1..20: mol_type = other DNA
tttcatggacctgtaaaaaa

SEQ ID NO: 158131 - DNA, 20 bp, synthetic construct
  source 1..20: mol_type = other DNA
ttttcatggacctgtaaaaa

SEQ ID NO: 158132 - DNA, 20 bp, synthetic construct
  source 1..20: mol_type = other DNA
tttttcatggacctgtaaaa

SEQ ID NO: 158133 - DNA, 20 bp, synthetic construct
  source 1..20: mol_type = other DNA
ctttttcatggacctgtaaa

SEQ ID NO: 158134 - DNA, 20 bp, synthetic construct
  source 1..20: mol_type = other DNA
gctttttcatggacctgtaa

SEQ ID NO: 158135 - DNA, 20 bp, synthetic construct
  source 1..20: mol_type = other DNA
tgctttttcatggacctgta

SEQ ID NO: 158136 - DNA, 20 bp, synthetic construct
  source 1..20: mol_type = other DNA
ctgctttttcatggacctgt

SEQ ID NO: 158137 - DNA, 20 bp, synthetic construct
  source 1..20: mol_type = other DNA
tctgctttttcatggacctg

SEQ ID NO: 158138 - DNA, 20 bp, synthetic construct
  source 1..20: mol_type = other DNA
atctgctttttcatggacct

SEQ ID NO: 158139 - DNA, 20 bp, synthetic construct
  source 1..20: mol_type = other DNA
catctgctttttcatggacc

SEQ ID NO: 158140 - DNA, 20 bp, synthetic construct
  source 1..20: mol_type = other DNA
tcatctgctttttcatggac

SEQ ID NO: 158141 - DNA, 20 bp, synthetic construct
  source 1..20: mol_type = other DNA
gtcatctgctttttcatgga

SEQ ID NO: 158142 - DNA, 20 bp, synthetic construct
  source 1..20: mol_type = other DNA
agtcatctgctttttcatgg

SEQ ID NO: 158143 - DNA, 20 bp, synthetic construct
  source 1..20: mol_type = other DNA
aagtcatctgctttttcatg

SEQ ID NO: 158144 - DNA, 20 bp, synthetic construct
  source 1..20: mol_type = other DNA
caagtcatctgctttttcat

SEQ ID NO: 158145 - DNA, 20 bp, synthetic construct
  source 1..20: mol_type = other DNA
ccaagtcatctgctttttca

SEQ ID NO: 158146 - DNA, 20 bp, synthetic construct
  source 1..20: mol_type = other DNA
cccaagtcatctgctttttc

SEQ ID NO: 158147 - DNA, 20 bp, synthetic construct
  source 1..20: mol_type = other DNA
gcccaagtcatctgcttttt

SEQ ID NO: 158148 - DNA, 20 bp, synthetic construct
  source 1..20: mol_type = other DNA
tgcccaagtcatctgctttt

SEQ ID NO: 158149 - DNA, 20 bp, synthetic construct
  source 1..20: mol_type = other DNA
ttgcccaagtcatctgcttt

SEQ ID NO: 158150 - DNA, 20 bp, synthetic construct
  source 1..20: mol_type = other DNA
tttgcccaagtcatctgctt

SEQ ID NO: 158151 - DNA, 20 bp, synthetic construct
  source 1..20: mol_type = other DNA
ctttgcccaagtcatctgct

SEQ ID NO: 158152 - DNA, 20 bp, synthetic construct
  source 1..20: mol_type = other DNA
cctttgcccaagtcatctgc

SEQ ID NO: 158153 - DNA, 20 bp, synthetic construct
  source 1..20: mol_type = other DNA
acctttgcccaagtcatctg

SEQ ID NO: 158154 - DNA, 20 bp, synthetic construct
  source 1..20: mol_type = other DNA
cacctttgcccaagtcatct

SEQ ID NO: 158155 - DNA, 20 bp, synthetic construct
  source 1..20: mol_type = other DNA
ccacctttgcccaagtcatc

SEQ ID NO: 158156 - DNA, 20 bp, synthetic construct
  source 1..20: mol_type = other DNA
tccacctttgcccaagtcat

SEQ ID NO: 158157 - DNA, 20 bp, synthetic construct
  source 1..20: mol_type = other DNA
ttccacctttgcccaagtca

SEQ ID NO: 158158 - DNA, 20 bp, synthetic construct
  source 1..20: mol_type = other DNA
tttccacctttgcccaagtc

SEQ ID NO: 158159 - DNA, 20 bp, synthetic construct
  source 1..20: mol_type = other DNA
atttccacctttgcccaagt

SEQ ID NO: 158160 - DNA, 20 bp, synthetic construct
  source 1..20: mol_type = other DNA
catttccacctttgcccaag

SEQ ID NO: 158161 - DNA, 20 bp, synthetic construct
  source 1..20: mol_type = other DNA
tcatttccacctttgcccaa

SEQ ID NO: 158162 - DNA, 20 bp, synthetic construct
  source 1..20: mol_type = other DNA
ttcatttccacctttgccca

SEQ ID NO: 158163 - DNA, 20 bp, synthetic construct
  source 1..20: mol_type = other DNA
cttcatttccacctttgccc

SEQ ID NO: 158164 - DNA, 20 bp, synthetic construct
  source 1..20: mol_type = other DNA
tcttcatttccacctttgcc

SEQ ID NO: 158165 - DNA, 20 bp, synthetic construct
  source 1..20: mol_type = other DNA
ttcttcatttccacctttgc

SEQ ID NO: 158166 - DNA, 20 bp, synthetic construct
  source 1..20: mol_type = other DNA
tttcttcatttccacctttg

SEQ ID NO: 158167 - DNA, 20 bp, synthetic construct
  source 1..20: mol_type = other DNA
ctttcttcatttccaccttt

SEQ ID NO: 158168 - DNA, 20 bp, synthetic construct
  source 1..20: mol_type = other DNA
actttcttcatttccacctt

SEQ ID NO: 158169 - DNA, 20 bp, synthetic construct
  source 1..20: mol_type = other DNA
tactttcttcatttccacct

SEQ ID NO: 158170 - DNA, 20 bp, synthetic construct
  source 1..20: mol_type = other DNA
gtactttcttcatttccacc

SEQ ID NO: 158171 - DNA, 20 bp, synthetic construct
  source 1..20: mol_type = other DNA
tgtactttcttcatttccac

SEQ ID NO: 158172 - DNA, 20 bp, synthetic construct
  source 1..20: mol_type = other DNA
ttgtactttcttcatttcca

SEQ ID NO: 158173 - DNA, 20 bp, synthetic construct
  source 1..20: mol_type = other DNA
tttgtactttcttcatttcc

SEQ ID NO: 158174 - DNA, 20 bp, synthetic construct
  source 1..20: mol_type = other DNA
ctttgtactttcttcatttc

SEQ ID NO: 158175 - DNA, 20 bp, synthetic construct
  source 1..20: mol_type = other DNA
tctttgtactttcttcattt

SEQ ID NO: 158176 - DNA, 20 bp, synthetic construct
  source 1..20: mol_type = other DNA
gtctttgtactttcttcatt

SEQ ID NO: 158177 - DNA, 20 bp, synthetic construct
  source 1..20: mol_type = other DNA
tgtctttgtactttcttcat

SEQ ID NO: 158178 - DNA, 20 bp, synthetic construct
  source 1..20: mol_type = other DNA
ctgtctttgtactttcttca

SEQ ID NO: 158179 - DNA, 20 bp, synthetic construct
  source 1..20: mol_type = other DNA
cctgtctttgtactttcttc

SEQ ID NO: 158180 - DNA, 20 bp, synthetic construct
  source 1..20: mol_type = other DNA
tcctgtctttgtactttctt

SEQ ID NO: 158181 - DNA, 20 bp, synthetic construct
  source 1..20: mol_type = other DNA
ttcctgtctttgtactttct

SEQ ID NO: 158182 - DNA, 20 bp, synthetic construct
  source 1..20: mol_type = other DNA
tttcctgtctttgtactttc

SEQ ID NO: 158183 - DNA, 20 bp, synthetic construct
  source 1..20: mol_type = other DNA
gtttcctgtctttgtacttt

SEQ ID NO: 158184 - DNA, 20 bp, synthetic construct
  source 1..20: mol_type = other DNA
cgtttcctgtctttgtactt

SEQ ID NO: 158185 - DNA, 20 bp, synthetic construct
  source 1..20: mol_type = other DNA
gcgtttcctgtctttgtact

SEQ ID NO: 158186 - DNA, 20 bp, synthetic construct
  source 1..20: mol_type = other DNA
agcgtttcctgtctttgtac

SEQ ID NO: 158187 - DNA, 20 bp, synthetic construct
  source 1..20: mol_type = other DNA
cagcgtttcctgtctttgta

SEQ ID NO: 158188 - DNA, 20 bp, synthetic construct
  source 1..20: mol_type = other DNA
ccagcgtttcctgtctttgt

SEQ ID NO: 158189 - DNA, 20 bp, synthetic construct
  source 1..20: mol_type = other DNA
tccagcgtttcctgtctttg

SEQ ID NO: 158190 - DNA, 20 bp, synthetic construct
  source 1..20: mol_type = other DNA
ttccagcgtttcctgtcttt

SEQ ID NO: 158191 - DNA, 20 bp, synthetic construct
  source 1..20: mol_type = other DNA
cttccagcgtttcctgtctt

SEQ ID NO: 158192 - DNA, 20 bp, synthetic construct
  source 1..20: mol_type = other DNA
acttccagcgtttcctgtct

SEQ ID NO: 158193 - DNA, 20 bp, synthetic construct
  source 1..20: mol_type = other DNA
gacttccagcgtttcctgtc

SEQ ID NO: 158194 - DNA, 20 bp, synthetic construct
  source 1..20: mol_type = other DNA
cgacttccagcgtttcctgt

SEQ ID NO: 158195 - DNA, 20 bp, synthetic construct
  source 1..20: mol_type = other DNA
acgacttccagcgtttcctg

SEQ ID NO: 158196 - DNA, 20 bp, synthetic construct
  source 1..20: mol_type = other DNA
aacgacttccagcgtttcct

SEQ ID NO: 158197 - DNA, 20 bp, synthetic construct
  source 1..20: mol_type = other DNA
aaacgacttccagcgtttcc

SEQ ID NO: 158198 - DNA, 20 bp, synthetic construct
  source 1..20: mol_type = other DNA
caaacgacttccagcgtttc

SEQ ID NO: 158199 - DNA, 20 bp, synthetic construct
  source 1..20: mol_type = other DNA
ccaaacgacttccagcgttt

SEQ ID NO: 158200 - DNA, 20 bp, synthetic construct
  source 1..20: mol_type = other DNA
gccaaacgacttccagcgtt

SEQ ID NO: 158201 - DNA, 20 bp, synthetic construct
  source 1..20: mol_type = other DNA
agccaaacgacttccagcgt

SEQ ID NO: 158202 - DNA, 20 bp, synthetic construct
  source 1..20: mol_type = other DNA
aagccaaacgacttccagcg

SEQ ID NO: 158203 - DNA, 20 bp, synthetic construct
  source 1..20: mol_type = other DNA
caagccaaacgacttccagc

SEQ ID NO: 158204 - DNA, 20 bp, synthetic construct
  source 1..20: mol_type = other DNA
acaagccaaacgacttccag

SEQ ID NO: 158205 - DNA, 20 bp, synthetic construct
  source 1..20: mol_type = other DNA
cacaagccaaacgacttcca

SEQ ID NO: 158206 - DNA, 20 bp, synthetic construct
  source 1..20: mol_type = other DNA
ccacaagccaaacgacttcc

SEQ ID NO: 158207 - DNA, 20 bp, synthetic construct
  source 1..20: mol_type = other DNA
accacaagccaaacgacttc

SEQ ID NO: 158208 - DNA, 20 bp, synthetic construct
  source 1..20: mol_type = other DNA
caccacaagccaaacgactt

SEQ ID NO: 158209 - DNA, 20 bp, synthetic construct
  source 1..20: mol_type = other DNA
acaccacaagccaaacgact

SEQ ID NO: 158210 - DNA, 20 bp, synthetic construct
  source 1..20: mol_type = other DNA
tacaccacaagccaaacgac

SEQ ID NO: 158211 - DNA, 20 bp, synthetic construct
  source 1..20: mol_type = other DNA
ttacaccacaagccaaacga

SEQ ID NO: 158212 - DNA, 20 bp, synthetic construct
  source 1..20: mol_type = other DNA
attacaccacaagccaaacg

SEQ ID NO: 158213 - DNA, 20 bp, synthetic construct
  source 1..20: mol_type = other DNA
aattacaccacaagccaaac

SEQ ID NO: 158214 - DNA, 20 bp, synthetic construct
  source 1..20: mol_type = other DNA
caattacaccacaagccaaa

SEQ ID NO: 158215 - DNA, 20 bp, synthetic construct
  source 1..20: mol_type = other DNA
ccaattacaccacaagccaa

SEQ ID NO: 158216 - DNA, 20 bp, synthetic construct
  source 1..20: mol_type = other DNA
cccaattacaccacaagcca

SEQ ID NO: 158217 - DNA, 20 bp, synthetic construct
  source 1..20: mol_type = other DNA
tcccaattacaccacaagcc

SEQ ID NO: 158218 - DNA, 20 bp, synthetic construct
  source 1..20: mol_type = other DNA
atcccaattacaccacaagc

SEQ ID NO: 158219 - DNA, 20 bp, synthetic construct
  source 1..20: mol_type = other DNA
gatcccaattacaccacaag

SEQ ID NO: 158220 - DNA, 20 bp, synthetic construct
  source 1..20: mol_type = other DNA
cgatcccaattacaccacaa

SEQ ID NO: 158221 - DNA, 20 bp, synthetic construct
  source 1..20: mol_type = other DNA
gcgatcccaattacaccaca

SEQ ID NO: 158222 - DNA, 20 bp, synthetic construct
  source 1..20: mol_type = other DNA
ggcgatcccaattacaccac

SEQ ID NO: 158223 - DNA, 20 bp, synthetic construct
  source 1..20: mol_type = other DNA
gggcgatcccaattacacca

SEQ ID NO: 158224 - DNA, 20 bp, synthetic construct
  source 1..20: mol_type = other DNA
tgggcgatcccaattacacc

SEQ ID NO: 158225 - DNA, 20 bp, synthetic construct
  source 1..20: mol_type = other DNA
ttgggcgatcccaattacac

SEQ ID NO: 158226 - DNA, 20 bp, synthetic construct
  source 1..20: mol_type = other DNA
attgggcgatcccaattaca

SEQ ID NO: 158227 - DNA, 20 bp, synthetic construct
  source 1..20: mol_type = other DNA
tattgggcgatcccaattac

SEQ ID NO: 158228 - DNA, 20 bp, synthetic construct
  source 1..20: mol_type = other DNA
ttattgggcgatcccaatta

SEQ ID NO: 158229 - DNA, 20 bp, synthetic construct
  source 1..20: mol_type = other DNA
tttattgggcgatcccaatt

SEQ ID NO: 158230 - DNA, 20 bp, synthetic construct
  source 1..20: mol_type = other DNA
gtttattgggcgatcccaat

SEQ ID NO: 158231 - DNA, 20 bp, synthetic construct
  source 1..20: mol_type = other DNA
tgtttattgggcgatcccaa

SEQ ID NO: 158232 - DNA, 20 bp, synthetic construct
  source 1..20: mol_type = other DNA
atgtttattgggcgatccca

SEQ ID NO: 158233 - DNA, 20 bp, synthetic construct
  source 1..20: mol_type = other DNA
aatgtttattgggcgatccc

SEQ ID NO: 158234 - DNA, 20 bp, synthetic construct
  source 1..20: mol_type = other DNA
gaatgtttattgggcgatcc

SEQ ID NO: 158235 - DNA, 20 bp, synthetic construct
  source 1..20: mol_type = other DNA
ggaatgtttattgggcgatc

SEQ ID NO: 158236 - DNA, 20 bp, synthetic construct
  source 1..20: mol_type = other DNA
gggaatgtttattgggcgat

SEQ ID NO: 158237 - DNA, 20 bp, synthetic construct
  source 1..20: mol_type = other DNA
agggaatgtttattgggcga

SEQ ID NO: 158238 - DNA, 20 bp, synthetic construct
  source 1..20: mol_type = other DNA
aagggaatgtttattgggcg

SEQ ID NO: 158239 - DNA, 20 bp, synthetic construct
  source 1..20: mol_type = other DNA
caagggaatgtttattgggc

SEQ ID NO: 158240 - DNA, 20 bp, synthetic construct
  source 1..20: mol_type = other DNA
ccaagggaatgtttattggg

SEQ ID NO: 158241 - DNA, 20 bp, synthetic construct
  source 1..20: mol_type = other DNA
tccaagggaatgtttattgg

SEQ ID NO: 158242 - DNA, 20 bp, synthetic construct
  source 1..20: mol_type = other DNA
atccaagggaatgtttattg

SEQ ID NO: 158243 - DNA, 20 bp, synthetic construct
  source 1..20: mol_type = other DNA
catccaagggaatgtttatt

SEQ ID NO: 158244 - DNA, 20 bp, synthetic construct
  source 1..20: mol_type = other DNA
acatccaagggaatgtttat

SEQ ID NO: 158245 - DNA, 20 bp, synthetic construct
  source 1..20: mol_type = other DNA
tacatccaagggaatgttta

SEQ ID NO: 158246 - DNA, 20 bp, synthetic construct
  source 1..20: mol_type = other DNA
ctacatccaagggaatgttt

SEQ ID NO: 158247 - DNA, 20 bp, synthetic construct
  source 1..20: mol_type = other DNA
actacatccaagggaatgtt

SEQ ID NO: 158248 - DNA, 20 bp, synthetic construct
  source 1..20: mol_type = other DNA
gactacatccaagggaatgt

SEQ ID NO: 158249 - DNA, 20 bp, synthetic construct
  source 1..20: mol_type = other DNA
agactacatccaagggaatg

SEQ ID NO: 158250 - DNA, 20 bp, synthetic construct
  source 1..20: mol_type = other DNA
cagactacatccaagggaat

SEQ ID NO: 158251 - DNA, 20 bp, synthetic construct
  source 1..20: mol_type = other DNA
tcagactacatccaagggaa

SEQ ID NO: 158252 - DNA, 20 bp, synthetic construct
  source 1..20: mol_type = other DNA
ctcagactacatccaaggga

SEQ ID NO: 158253 - DNA, 20 bp, synthetic construct
  source 1..20: mol_type = other DNA
cctcagactacatccaaggg

SEQ ID NO: 158254 - DNA, 20 bp, synthetic construct
  source 1..20: mol_type = other DNA
gcctcagactacatccaagg

SEQ ID NO: 158255 - DNA, 20 bp, synthetic construct
  source 1..20: mol_type = other DNA
ggcctcagactacatccaag

SEQ ID NO: 158256 - DNA, 20 bp, synthetic construct
  source 1..20: mol_type = other DNA
gggcctcagactacatccaa

SEQ ID NO: 158257 - DNA, 20 bp, synthetic construct
  source 1..20: mol_type = other DNA
ggggcctcagactacatcca

SEQ ID NO: 158258 - DNA, 20 bp, synthetic construct
  source 1..20: mol_type = other DNA
aggggcctcagactacatcc

SEQ ID NO: 158259 - DNA, 20 bp, synthetic construct
  source 1..20: mol_type = other DNA
aaggggcctcagactacatc

SEQ ID NO: 158260 - DNA, 20 bp, synthetic construct
  source 1..20: mol_type = other DNA
taaggggcctcagactacat

SEQ ID NO: 158261 - DNA, 20 bp, synthetic construct
  source 1..20: mol_type = other DNA
ttaaggggcctcagactaca

SEQ ID NO: 158262 - DNA, 20 bp, synthetic construct
  source 1..20: mol_type = other DNA
gttaaggggcctcagactac

SEQ ID NO: 158263 - DNA, 20 bp, synthetic construct
  source 1..20: mol_type = other DNA
agttaaggggcctcagacta

SEQ ID NO: 158264 - DNA, 20 bp, synthetic construct
  source 1..20: mol_type = other DNA
gagttaaggggcctcagact

SEQ ID NO: 158265 - DNA, 20 bp, synthetic construct
  source 1..20: mol_type = other DNA
tgagttaaggggcctcagac

SEQ ID NO: 158266 - DNA, 20 bp, synthetic construct
  source 1..20: mol_type = other DNA
atgagttaaggggcctcaga

SEQ ID NO: 158267 - DNA, 20 bp, synthetic construct
  source 1..20: mol_type = other DNA
gatgagttaaggggcctcag

SEQ ID NO: 158268 - DNA, 20 bp, synthetic construct
  source 1..20: mol_type = other DNA
agatgagttaaggggcctca

SEQ ID NO: 158269 - DNA, 20 bp, synthetic construct
  source 1..20: mol_type = other DNA
cagatgagttaaggggcctc

SEQ ID NO: 158270 - DNA, 20 bp, synthetic construct
  source 1..20: mol_type = other DNA
acagatgagttaaggggcct

SEQ ID NO: 158271 - DNA, 20 bp, synthetic construct
  source 1..20: mol_type = other DNA
aacagatgagttaaggggcc

SEQ ID NO: 158272 - DNA, 20 bp, synthetic construct
  source 1..20: mol_type = other DNA
taacagatgagttaaggggc

SEQ ID NO: 158273 - DNA, 20 bp, synthetic construct
  source 1..20: mol_type = other DNA
ataacagatgagttaagggg

SEQ ID NO: 158274 - DNA, 20 bp, synthetic construct
  source 1..20: mol_type = other DNA
gataacagatgagttaaggg

SEQ ID NO: 158275 - DNA, 20 bp, synthetic construct
  source 1..20: mol_type = other DNA
ggataacagatgagttaagg

SEQ ID NO: 158276 - DNA, 20 bp, synthetic construct
  source 1..20: mol_type = other DNA
aggataacagatgagttaag

SEQ ID NO: 158277 - DNA, 20 bp, synthetic construct
  source 1..20: mol_type = other DNA
caggataacagatgagttaa

SEQ ID NO: 158278 - DNA, 20 bp, synthetic construct
  source 1..20: mol_type = other DNA
gcaggataacagatgagtta

SEQ ID NO: 158279 - DNA, 20 bp, synthetic construct
  source 1..20: mol_type = other DNA
agcaggataacagatgagtt

SEQ ID NO: 158280 - DNA, 20 bp, synthetic construct
  source 1..20: mol_type = other DNA
tagcaggataacagatgagt

SEQ ID NO: 158281 - DNA, 20 bp, synthetic construct
  source 1..20: mol_type = other DNA
ctagcaggataacagatgag

SEQ ID NO: 158282 - DNA, 20 bp, synthetic construct
  source 1..20: mol_type = other DNA
gctagcaggataacagatga

SEQ ID NO: 158283 - DNA, 20 bp, synthetic construct
  source 1..20: mol_type = other DNA
agctagcaggataacagatg

SEQ ID NO: 158284 - DNA, 20 bp, synthetic construct
  source 1..20: mol_type = other DNA
cagctagcaggataacagat

SEQ ID NO: 158285 - DNA, 20 bp, synthetic construct
  source 1..20: mol_type = other DNA
acagctagcaggataacaga

SEQ ID NO: 158286 - DNA, 20 bp, synthetic construct
  source 1..20: mol_type = other DNA
tacagctagcaggataacag

SEQ ID NO: 158287 - DNA, 20 bp, synthetic construct
  source 1..20: mol_type = other DNA
ctacagctagcaggataaca

SEQ ID NO: 158288 - DNA, 20 bp, synthetic construct
  source 1..20: mol_type = other DNA
tctacagctagcaggataac

SEQ ID NO: 158289 - DNA, 20 bp, synthetic construct
  source 1..20: mol_type = other DNA
ttctacagctagcaggataa

SEQ ID NO: 158290 - DNA, 20 bp, synthetic construct
  source 1..20: mol_type = other DNA
tttctacagctagcaggata

SEQ ID NO: 158291 - DNA, 20 bp, synthetic construct
  source 1..20: mol_type = other DNA
atttctacagctagcaggat

SEQ ID NO: 158292 - DNA, 20 bp, synthetic construct
  source 1..20: mol_type = other DNA
catttctacagctagcagga

SEQ ID NO: 158293 - DNA, 20 bp, synthetic construct
  source 1..20: mol_type = other DNA
acatttctacagctagcagg

SEQ ID NO: 158294 - DNA, 20 bp, synthetic construct
  source 1..20: mol_type = other DNA
tacatttctacagctagcag

SEQ ID NO: 158295 - DNA, 20 bp, synthetic construct
  source 1..20: mol_type = other DNA
atacatttctacagctagca

SEQ ID NO: 158296 - DNA, 20 bp, synthetic construct
  source 1..20: mol_type = other DNA
gatacatttctacagctagc

SEQ ID NO: 158297 - DNA, 20 bp, synthetic construct
  source 1..20: mol_type = other DNA
ggatacatttctacagctag

SEQ ID NO: 158298 - DNA, 20 bp, synthetic construct
  source 1..20: mol_type = other DNA
aggatacatttctacagcta

SEQ ID NO: 158299 - DNA, 20 bp, synthetic construct
  source 1..20: mol_type = other DNA
caggatacatttctacagct

SEQ ID NO: 158300 - DNA, 20 bp, synthetic construct
  source 1..20: mol_type = other DNA
tcaggatacatttctacagc

SEQ ID NO: 158301 - DNA, 20 bp, synthetic construct
  source 1..20: mol_type = other DNA
atcaggatacatttctacag

SEQ ID NO: 158302 - DNA, 20 bp, synthetic construct
  source 1..20: mol_type = other DNA
tatcaggatacatttctaca

SEQ ID NO: 158303 - DNA, 20 bp, synthetic construct
  source 1..20: mol_type = other DNA
ttatcaggatacatttctac

SEQ ID NO: 158304 - DNA, 20 bp, synthetic construct
  source 1..20: mol_type = other DNA
tttatcaggatacatttcta

SEQ ID NO: 158305 - DNA, 20 bp, synthetic construct
  source 1..20: mol_type = other DNA
gtttatcaggatacatttct

SEQ ID NO: 158306 - DNA, 20 bp, synthetic construct
  source 1..20: mol_type = other DNA
tgtttatcaggatacatttc

SEQ ID NO: 158307 - DNA, 20 bp, synthetic construct
  source 1..20: mol_type = other DNA
atgtttatcaggatacattt

SEQ ID NO: 158308 - DNA, 20 bp, synthetic construct
  source 1..20: mol_type = other DNA
aatgtttatcaggatacatt

SEQ ID NO: 158309 - DNA, 20 bp, synthetic construct
  source 1..20: mol_type = other DNA
taatgtttatcaggatacat

SEQ ID NO: 158310 - DNA, 20 bp, synthetic construct
  source 1..20: mol_type = other DNA
ttaatgtttatcaggataca

SEQ ID NO: 158311 - DNA, 20 bp, synthetic construct
  source 1..20: mol_type = other DNA
tttaatgtttatcaggatac

SEQ ID NO: 158312 - DNA, 20 bp, synthetic construct
  source 1..20: mol_type = other DNA
gtttaatgtttatcaggata

SEQ ID NO: 158313 - DNA, 20 bp, synthetic construct
  source 1..20: mol_type = other DNA
tgtttaatgtttatcaggat

SEQ ID NO: 158314 - DNA, 20 bp, synthetic construct
  source 1..20: mol_type = other DNA
gtgtttaatgtttatcagga

SEQ ID NO: 158315 - DNA, 20 bp, synthetic construct
  source 1..20: mol_type = other DNA
agtgtttaatgtttatcagg

SEQ ID NO: 158316 - DNA, 20 bp, synthetic construct
  source 1..20: mol_type = other DNA
cagtgtttaatgtttatcag

SEQ ID NO: 158317 - DNA, 20 bp, synthetic construct
  source 1..20: mol_type = other DNA
acagtgtttaatgtttatca

SEQ ID NO: 158318 - DNA, 20 bp, synthetic construct
  source 1..20: mol_type = other DNA
tacagtgtttaatgtttatc

SEQ ID NO: 158319 - DNA, 20 bp, synthetic construct
  source 1..20: mol_type = other DNA
ttacagtgtttaatgtttat

SEQ ID NO: 158320 - DNA, 20 bp, synthetic construct
  source 1..20: mol_type = other DNA
attacagtgtttaatgttta

SEQ ID NO: 158321 - DNA, 20 bp, synthetic construct
  source 1..20: mol_type = other DNA
gattacagtgtttaatgttt

SEQ ID NO: 158322 - DNA, 20 bp, synthetic construct
  source 1..20: mol_type = other DNA
agattacagtgtttaatgtt

SEQ ID NO: 158323 - DNA, 20 bp, synthetic construct
  source 1..20: mol_type = other DNA
aagattacagtgtttaatgt

SEQ ID NO: 158324 - DNA, 20 bp, synthetic construct
  source 1..20: mol_type = other DNA
taagattacagtgtttaatg

SEQ ID NO: 158325 - DNA, 20 bp, synthetic construct
  source 1..20: mol_type = other DNA
ttaagattacagtgtttaat

SEQ ID NO: 158326 - DNA, 20 bp, synthetic construct
  source 1..20: mol_type = other DNA
tttaagattacagtgtttaa

SEQ ID NO: 158327 - DNA, 20 bp, synthetic construct
  source 1..20: mol_type = other DNA
ttttaagattacagtgttta

SEQ ID NO: 158328 - DNA, 20 bp, synthetic construct
  source 1..20: mol_type = other DNA
cttttaagattacagtgttt

SEQ ID NO: 158329 - DNA, 20 bp, synthetic construct
  source 1..20: mol_type = other DNA
acttttaagattacagtgtt

SEQ ID NO: 158330 - DNA, 20 bp, synthetic construct
  source 1..20: mol_type = other DNA
cacttttaagattacagtgt

SEQ ID NO: 158331 - DNA, 20 bp, synthetic construct
  source 1..20: mol_type = other DNA
acacttttaagattacagtg

SEQ ID NO: 158332 - DNA, 20 bp, synthetic construct
  source 1..20: mol_type = other DNA
tacacttttaagattacagt

SEQ ID NO: 158333 - DNA, 20 bp, synthetic construct
  source 1..20: mol_type = other DNA
ttacacttttaagattacag

SEQ ID NO: 158334 - DNA, 20 bp, synthetic construct
  source 1..20: mol_type = other DNA
attacacttttaagattaca

SEQ ID NO: 158335 - DNA, 20 bp, synthetic construct
  source 1..20: mol_type = other DNA
aattacacttttaagattac

SEQ ID NO: 158336 - DNA, 20 bp, synthetic construct
  source 1..20: mol_type = other DNA
caattacacttttaagatta

SEQ ID NO: 158337 - DNA, 20 bp, synthetic construct
  source 1..20: mol_type = other DNA
acaattacacttttaagatt

SEQ ID NO: 158338 - DNA, 20 bp, synthetic construct
  source 1..20: mol_type = other DNA
cacaattacacttttaagat

SEQ ID NO: 158339 - DNA, 20 bp, synthetic construct
  source 1..20: mol_type = other DNA
acacaattacacttttaaga

SEQ ID NO: 158340 - DNA, 20 bp, synthetic construct
  source 1..20: mol_type = other DNA
cacacaattacacttttaag

SEQ ID NO: 158341 - DNA, 20 bp, synthetic construct
  source 1..20: mol_type = other DNA
tcacacaattacacttttaa

SEQ ID NO: 158342 - DNA, 20 bp, synthetic construct
  source 1..20: mol_type = other DNA
gtcacacaattacactttta

SEQ ID NO: 158343 - DNA, 20 bp, synthetic construct
  source 1..20: mol_type = other DNA
agtcacacaattacactttt

SEQ ID NO: 158344 - DNA, 20 bp, synthetic construct
  source 1..20: mol_type = other DNA
aagtcacacaattacacttt

SEQ ID NO: 158345 - DNA, 20 bp, synthetic construct
  source 1..20: mol_type = other DNA
aaagtcacacaattacactt

SEQ ID NO: 158346 - DNA, 20 bp, synthetic construct
  source 1..20: mol_type = other DNA
aaaagtcacacaattacact

SEQ ID NO: 158347 - DNA, 20 bp, synthetic construct
  source 1..20: mol_type = other DNA
aaaaagtcacacaattacac

SEQ ID NO: 158348 - DNA, 20 bp, synthetic construct
  source 1..20: mol_type = other DNA
gaaaaagtcacacaattaca

SEQ ID NO: 158349 - DNA, 20 bp, synthetic construct
  source 1..20: mol_type = other DNA
tgaaaaagtcacacaattac

SEQ ID NO: 158350 - DNA, 20 bp, synthetic construct
  source 1..20: mol_type = other DNA
ctgaaaaagtcacacaatta

SEQ ID NO: 158351 - DNA, 20 bp, synthetic construct
  source 1..20: mol_type = other DNA
tctgaaaaagtcacacaatt

SEQ ID NO: 158352 - DNA, 20 bp, synthetic construct
  source 1..20: mol_type = other DNA
ctctgaaaaagtcacacaat

SEQ ID NO: 158353 - DNA, 20 bp, synthetic construct
  source 1..20: mol_type = other DNA
actctgaaaaagtcacacaa

SEQ ID NO: 158354 - DNA, 20 bp, synthetic construct
  source 1..20: mol_type = other DNA
aactctgaaaaagtcacaca

SEQ ID NO: 158355 - DNA, 20 bp, synthetic construct
  source 1..20: mol_type = other DNA
caactctgaaaaagtcacac

SEQ ID NO: 158356 - DNA, 20 bp, synthetic construct
  source 1..20: mol_type = other DNA
gcaactctgaaaaagtcaca

SEQ ID NO: 158357 - DNA, 20 bp, synthetic construct
  source 1..20: mol_type = other DNA
agcaactctgaaaaagtcac

SEQ ID NO: 158358 - DNA, 20 bp, synthetic construct
  source 1..20: mol_type = other DNA
aagcaactctgaaaaagtca

SEQ ID NO: 158359 - DNA, 20 bp, synthetic construct
  source 1..20: mol_type = other DNA
aaagcaactctgaaaaagtc

SEQ ID NO: 158360 - DNA, 20 bp, synthetic construct
  source 1..20: mol_type = other DNA
taaagcaactctgaaaaagt

SEQ ID NO: 158361 - DNA, 20 bp, synthetic construct
  source 1..20: mol_type = other DNA
ttaaagcaactctgaaaaag

SEQ ID NO: 158362 - DNA, 20 bp, synthetic construct
  source 1..20: mol_type = other DNA
tttaaagcaactctgaaaaa

SEQ ID NO: 158363 - DNA, 20 bp, synthetic construct
  source 1..20: mol_type = other DNA
ctttaaagcaactctgaaaa

SEQ ID NO: 158364 - DNA, 20 bp, synthetic construct
  source 1..20: mol_type = other DNA
actttaaagcaactctgaaa

SEQ ID NO: 158365 - DNA, 20 bp, synthetic construct
  source 1..20: mol_type = other DNA
tactttaaagcaactctgaa

SEQ ID NO: 158366 - DNA, 20 bp, synthetic construct
  source 1..20: mol_type = other DNA
gtactttaaagcaactctga

SEQ ID NO: 158367 - DNA, 20 bp, synthetic construct
  source 1..20: mol_type = other DNA
ggtactttaaagcaactctg

SEQ ID NO: 158368 - DNA, 20 bp, synthetic construct
  source 1..20: mol_type = other DNA
aggtactttaaagcaactct

SEQ ID NO: 158369 - DNA, 20 bp, synthetic construct
  source 1..20: mol_type = other DNA
caggtactttaaagcaactc

SEQ ID NO: 158370 - DNA, 20 bp, synthetic construct
  source 1..20: mol_type = other DNA
acaggtactttaaagcaact

SEQ ID NO: 158371 - DNA, 20 bp, synthetic construct
  source 1..20: mol_type = other DNA
tacaggtactttaaagcaac

SEQ ID NO: 158372 - DNA, 20 bp, synthetic construct
  source 1..20: mol_type = other DNA
ctacaggtactttaaagcaa

SEQ ID NO: 158373 - DNA, 20 bp, synthetic construct
  source 1..20: mol_type = other DNA
actacaggtactttaaagca

SEQ ID NO: 158374 - DNA, 20 bp, synthetic construct
  source 1..20: mol_type = other DNA
cactacaggtactttaaagc

SEQ ID NO: 158375 - DNA, 20 bp, synthetic construct
  source 1..20: mol_type = other DNA
tcactacaggtactttaaag

SEQ ID NO: 158376 - DNA, 20 bp, synthetic construct
  source 1..20: mol_type = other DNA
ctcactacaggtactttaaa

SEQ ID NO: 158377 - DNA, 20 bp, synthetic construct
  source 1..20: mol_type = other DNA
tctcactacaggtactttaa

SEQ ID NO: 158378 - DNA, 20 bp, synthetic construct
  source 1..20: mol_type = other DNA
ttctcactacaggtacttta

SEQ ID NO: 158379 - DNA, 20 bp, synthetic construct
  source 1..20: mol_type = other DNA
tttctcactacaggtacttt

SEQ ID NO: 158380 - DNA, 20 bp, synthetic construct
  source 1..20: mol_type = other DNA
gtttctcactacaggtactt

SEQ ID NO: 158381 - DNA, 20 bp, synthetic construct
  source 1..20: mol_type = other DNA
agtttctcactacaggtact

SEQ ID NO: 158382 - DNA, 20 bp, synthetic construct
  source 1..20: mol_type = other DNA
cagtttctcactacaggtac

SEQ ID NO: 158383 - DNA, 20 bp, synthetic construct
  source 1..20: mol_type = other DNA
tcagtttctcactacaggta

SEQ ID NO: 158384 - DNA, 20 bp, synthetic construct
  source 1..20: mol_type = other DNA
atcagtttctcactacaggt

SEQ ID NO: 158385 - DNA, 20 bp, synthetic construct
  source 1..20: mol_type = other DNA
aatcagtttctcactacagg

SEQ ID NO: 158386 - DNA, 20 bp, synthetic construct
  source 1..20: mol_type = other DNA
aaatcagtttctcactacag

SEQ ID NO: 158387 - DNA, 20 bp, synthetic construct
  source 1..20: mol_type = other DNA
taaatcagtttctcactaca

SEQ ID NO: 158388 - DNA, 20 bp, synthetic construct
  source 1..20: mol_type = other DNA
ataaatcagtttctcactac

SEQ ID NO: 158389 - DNA, 20 bp, synthetic construct
  source 1..20: mol_type = other DNA
cataaatcagtttctcacta

SEQ ID NO: 158390 - DNA, 20 bp, synthetic construct
  source 1..20: mol_type = other DNA
tcataaatcagtttctcact

SEQ ID NO: 158391 - DNA, 20 bp, synthetic construct
  source 1..20: mol_type = other DNA
atcataaatcagtttctcac

SEQ ID NO: 158392 - DNA, 20 bp, synthetic construct
  source 1..20: mol_type = other DNA
gatcataaatcagtttctca

SEQ ID NO: 158393 - DNA, 20 bp, synthetic construct
  source 1..20: mol_type = other DNA
tgatcataaatcagtttctc

SEQ ID NO: 158394 - DNA, 20 bp, synthetic construct
  source 1..20: mol_type = other DNA
gtgatcataaatcagtttct

SEQ ID NO: 158395 - DNA, 20 bp, synthetic construct
  source 1..20: mol_type = other DNA
agtgatcataaatcagtttc

SEQ ID NO: 158396 - DNA, 20 bp, synthetic construct
  source 1..20: mol_type = other DNA
aagtgatcataaatcagttt

SEQ ID NO: 158397 - DNA, 20 bp, synthetic construct
  source 1..20: mol_type = other DNA
caagtgatcataaatcagtt

SEQ ID NO: 158398 - DNA, 20 bp, synthetic construct
  source 1..20: mol_type = other DNA
ccaagtgatcataaatcagt

SEQ ID NO: 158399 - DNA, 20 bp, synthetic construct
  source 1..20: mol_type = other DNA
tccaagtgatcataaatcag

SEQ ID NO: 158400 - DNA, 20 bp, synthetic construct
  source 1..20: mol_type = other DNA
ttccaagtgatcataaatca

SEQ ID NO: 158401 - DNA, 20 bp, synthetic construct
  source 1..20: mol_type = other DNA
cttccaagtgatcataaatc

SEQ ID NO: 158402 - DNA, 20 bp, synthetic construct
  source 1..20: mol_type = other DNA
tcttccaagtgatcataaat

SEQ ID NO: 158403 - DNA, 20 bp, synthetic construct
  source 1..20: mol_type = other DNA
atcttccaagtgatcataaa

SEQ ID NO: 158404 - DNA, 20 bp, synthetic construct
  source 1..20: mol_type = other DNA
aatcttccaagtgatcataa

SEQ ID NO: 158405 - DNA, 20 bp, synthetic construct
  source 1..20: mol_type = other DNA
aaatcttccaagtgatcata

SEQ ID NO: 158406 - DNA, 20 bp, synthetic construct
  source 1..20: mol_type = other DNA
caaatcttccaagtgatcat

SEQ ID NO: 158407 - DNA, 20 bp, synthetic construct
  source 1..20: mol_type = other DNA
acaaatcttccaagtgatca

SEQ ID NO: 158408 - DNA, 20 bp, synthetic construct
  source 1..20: mol_type = other DNA
tacaaatcttccaagtgatc

SEQ ID NO: 158409 - DNA, 20 bp, synthetic construct
  source 1..20: mol_type = other DNA
atacaaatcttccaagtgat

SEQ ID NO: 158410 - DNA, 20 bp, synthetic construct
  source 1..20: mol_type = other DNA
tatacaaatcttccaagtga

SEQ ID NO: 158411 - DNA, 20 bp, synthetic construct
  source 1..20: mol_type = other DNA
ctatacaaatcttccaagtg

SEQ ID NO: 158412 - DNA, 20 bp, synthetic construct
  source 1..20: mol_type = other DNA
actatacaaatcttccaagt

SEQ ID NO: 158413 - DNA, 20 bp, synthetic construct
  source 1..20: mol_type = other DNA
aactatacaaatcttccaag

SEQ ID NO: 158414 - DNA, 20 bp, synthetic construct
  source 1..20: mol_type = other DNA
aaactatacaaatcttccaa

SEQ ID NO: 158415 - DNA, 20 bp, synthetic construct
  source 1..20: mol_type = other DNA
aaaactatacaaatcttcca

SEQ ID NO: 158416 - DNA, 20 bp, synthetic construct
  source 1..20: mol_type = other DNA
taaaactatacaaatcttcc

SEQ ID NO: 158417 - DNA, 20 bp, synthetic construct
  source 1..20: mol_type = other DNA
ataaaactatacaaatcttc

SEQ ID NO: 158418 - DNA, 20 bp, synthetic construct
  source 1..20: mol_type = other DNA
tataaaactatacaaatctt

SEQ ID NO: 158419 - DNA, 20 bp, synthetic construct
  source 1..20: mol_type = other DNA
ttataaaactatacaaatct

SEQ ID NO: 158420 - DNA, 20 bp, synthetic construct
  source 1..20: mol_type = other DNA
tttataaaactatacaaatc

SEQ ID NO: 158421 - DNA, 20 bp, synthetic construct
  source 1..20: mol_type = other DNA
ttttataaaactatacaaat

SEQ ID NO: 158422 - DNA, 20 bp, synthetic construct
  source 1..20: mol_type = other DNA
gttttataaaactatacaaa

SEQ ID NO: 158423 - DNA, 20 bp, synthetic construct
  source 1..20: mol_type = other DNA
agttttataaaactatacaa

SEQ ID NO: 158424 - DNA, 20 bp, synthetic construct
  source 1..20: mol_type = other DNA
gagttttataaaactataca

SEQ ID NO: 158425 - DNA, 20 bp, synthetic construct
  source 1..20: mol_type = other DNA
tgagttttataaaactatac

SEQ ID NO: 158426 - DNA, 20 bp, synthetic construct
  source 1..20: mol_type = other DNA
ctgagttttataaaactata

SEQ ID NO: 158427 - DNA, 20 bp, synthetic construct
  source 1..20: mol_type = other DNA
actgagttttataaaactat

SEQ ID NO: 158428 - DNA, 20 bp, synthetic construct
  source 1..20: mol_type = other DNA
aactgagttttataaaacta

SEQ ID NO: 158429 - DNA, 20 bp, synthetic construct
  source 1..20: mol_type = other DNA
taactgagttttataaaact

SEQ ID NO: 158430 - DNA, 20 bp, synthetic construct
  source 1..20: mol_type = other DNA
ttaactgagttttataaaac

SEQ ID NO: 158431 - DNA, 20 bp, synthetic construct
  source 1..20: mol_type = other DNA
tttaactgagttttataaaa

SEQ ID NO: 158432 - DNA, 20 bp, synthetic construct
  source 1..20: mol_type = other DNA
ttttaactgagttttataaa

SEQ ID NO: 158433 - DNA, 20 bp, synthetic construct
  source 1..20: mol_type = other DNA
attttaactgagttttataa

SEQ ID NO: 158434 - DNA, 20 bp, synthetic construct
  source 1..20: mol_type = other DNA
cattttaactgagttttata

SEQ ID NO: 158435 - DNA, 20 bp, synthetic construct
  source 1..20: mol_type = other DNA
acattttaactgagttttat

SEQ ID NO: 158436 - DNA, 20 bp, synthetic construct
  source 1..20: mol_type = other DNA
gacattttaactgagtttta

SEQ ID NO: 158437 - DNA, 20 bp, synthetic construct
  source 1..20: mol_type = other DNA
agacattttaactgagtttt

SEQ ID NO: 158438 - DNA, 20 bp, synthetic construct
  source 1..20: mol_type = other DNA
cagacattttaactgagttt

SEQ ID NO: 158439 - DNA, 20 bp, synthetic construct
  source 1..20: mol_type = other DNA
acagacattttaactgagtt

SEQ ID NO: 158440 - DNA, 20 bp, synthetic construct
  source 1..20: mol_type = other DNA
aacagacattttaactgagt

SEQ ID NO: 158441 - DNA, 20 bp, synthetic construct
  source 1..20: mol_type = other DNA
aaacagacattttaactgag

SEQ ID NO: 158442 - DNA, 20 bp, synthetic construct
  source 1..20: mol_type = other DNA
gaaacagacattttaactga

SEQ ID NO: 158443 - DNA, 20 bp, synthetic construct
  source 1..20: mol_type = other DNA
tgaaacagacattttaactg

SEQ ID NO: 158444 - DNA, 20 bp, synthetic construct
  source 1..20: mol_type = other DNA
ttgaaacagacattttaact

SEQ ID NO: 158445 - DNA, 20 bp, synthetic construct
  source 1..20: mol_type = other DNA
attgaaacagacattttaac

SEQ ID NO: 158446 - DNA, 20 bp, synthetic construct
  source 1..20: mol_type = other DNA
cattgaaacagacattttaa

SEQ ID NO: 158447 - DNA, 20 bp, synthetic construct
  source 1..20: mol_type = other DNA
tcattgaaacagacatttta

SEQ ID NO: 158448 - DNA, 20 bp, synthetic construct
  source 1..20: mol_type = other DNA
gtcattgaaacagacatttt

SEQ ID NO: 158449 - DNA, 20 bp, synthetic construct
  source 1..20: mol_type = other DNA
ggtcattgaaacagacattt

SEQ ID NO: 158450 - DNA, 20 bp, synthetic construct
  source 1..20: mol_type = other DNA
aggtcattgaaacagacatt

SEQ ID NO: 158451 - DNA, 20 bp, synthetic construct
  source 1..20: mol_type = other DNA
caggtcattgaaacagacat

SEQ ID NO: 158452 - DNA, 20 bp, synthetic construct
  source 1..20: mol_type = other DNA
acaggtcattgaaacagaca

SEQ ID NO: 158453 - DNA, 20 bp, synthetic construct
  source 1..20: mol_type = other DNA
tacaggtcattgaaacagac

SEQ ID NO: 158454 - DNA, 20 bp, synthetic construct
  source 1..20: mol_type = other DNA
atacaggtcattgaaacaga

SEQ ID NO: 158455 - DNA, 20 bp, synthetic construct
  source 1..20: mol_type = other DNA
aatacaggtcattgaaacag

SEQ ID NO: 158456 - DNA, 20 bp, synthetic construct
  source 1..20: mol_type = other DNA
aaatacaggtcattgaaaca

SEQ ID NO: 158457 - DNA, 20 bp, synthetic construct
  source 1..20: mol_type = other DNA
aaaatacaggtcattgaaac

SEQ ID NO: 158458 - DNA, 20 bp, synthetic construct
  source 1..20: mol_type = other DNA
caaaatacaggtcattgaaa

SEQ ID NO: 158459 - DNA, 20 bp, synthetic construct
  source 1..20: mol_type = other DNA
gcaaaatacaggtcattgaa

SEQ ID NO: 158460 - DNA, 20 bp, synthetic construct
  source 1..20: mol_type = other DNA
ggcaaaatacaggtcattga

SEQ ID NO: 158461 - DNA, 20 bp, synthetic construct
  source 1..20: mol_type = other DNA
tggcaaaatacaggtcattg

SEQ ID NO: 158462 - DNA, 20 bp, synthetic construct
  source 1..20: mol_type = other DNA
ctggcaaaatacaggtcatt

SEQ ID NO: 158463 - DNA, 20 bp, synthetic construct
  source 1..20: mol_type = other DNA
tctggcaaaatacaggtcat

SEQ ID NO: 158464 - DNA, 20 bp, synthetic construct
  source 1..20: mol_type = other DNA
gtctggcaaaatacaggtca

SEQ ID NO: 158465 - DNA, 20 bp, synthetic construct
  source 1..20: mol_type = other DNA
agtctggcaaaatacaggtc

SEQ ID NO: 158466 - DNA, 20 bp, synthetic construct
  source 1..20: mol_type = other DNA
aagtctggcaaaatacaggt

SEQ ID NO: 158467 - DNA, 20 bp, synthetic construct
  source 1..20: mol_type = other DNA
taagtctggcaaaatacagg

SEQ ID NO: 158468 - DNA, 20 bp, synthetic construct
  source 1..20: mol_type = other DNA
ttaagtctggcaaaatacag

SEQ ID NO: 158469 - DNA, 20 bp, synthetic construct
  source 1..20: mol_type = other DNA
tttaagtctggcaaaataca

SEQ ID NO: 158470 - DNA, 20 bp, synthetic construct
  source 1..20: mol_type = other DNA
atttaagtctggcaaaatac

SEQ ID NO: 158471 - DNA, 20 bp, synthetic construct
  source 1..20: mol_type = other DNA
gatttaagtctggcaaaata

SEQ ID NO: 158472 - DNA, 20 bp, synthetic construct
  source 1..20: mol_type = other DNA
tgatttaagtctggcaaaat

SEQ ID NO: 158473 - DNA, 20 bp, synthetic construct
  source 1..20: mol_type = other DNA
gtgatttaagtctggcaaaa

SEQ ID NO: 158474 - DNA, 20 bp, synthetic construct
  source 1..20: mol_type = other DNA
tgtgatttaagtctggcaaa

SEQ ID NO: 158475 - DNA, 20 bp, synthetic construct
  source 1..20: mol_type = other DNA
ctgtgatttaagtctggcaa

SEQ ID NO: 158476 - DNA, 20 bp, synthetic construct
  source 1..20: mol_type = other DNA
tctgtgatttaagtctggca

SEQ ID NO: 158477 - DNA, 20 bp, synthetic construct
  source 1..20: mol_type = other DNA
atctgtgatttaagtctggc

SEQ ID NO: 158478 - DNA, 20 bp, synthetic construct
  source 1..20: mol_type = other DNA
catctgtgatttaagtctgg

SEQ ID NO: 158479 - DNA, 20 bp, synthetic construct
  source 1..20: mol_type = other DNA
ccatctgtgatttaagtctg

SEQ ID NO: 158480 - DNA, 20 bp, synthetic construct
  source 1..20: mol_type = other DNA
cccatctgtgatttaagtct

SEQ ID NO: 158481 - DNA, 20 bp, synthetic construct
  source 1..20: mol_type = other DNA
acccatctgtgatttaagtc

SEQ ID NO: 158482 - DNA, 20 bp, synthetic construct
  source 1..20: mol_type = other DNA
tacccatctgtgatttaagt

SEQ ID NO: 158483 - DNA, 20 bp, synthetic construct
  source 1..20: mol_type = other DNA
atacccatctgtgatttaag

SEQ ID NO: 158484 - DNA, 20 bp, synthetic construct
  source 1..20: mol_type = other DNA
aatacccatctgtgatttaa

SEQ ID NO: 158485 - DNA, 20 bp, synthetic construct
  source 1..20: mol_type = other DNA
taatacccatctgtgattta

SEQ ID NO: 158486 - DNA, 20 bp, synthetic construct
  source 1..20: mol_type = other DNA
ttaatacccatctgtgattt

SEQ ID NO: 158487 - DNA, 20 bp, synthetic construct
  source 1..20: mol_type = other DNA
tttaatacccatctgtgatt

SEQ ID NO: 158488 - DNA, 20 bp, synthetic construct
  source 1..20: mol_type = other DNA
gtttaatacccatctgtgat

SEQ ID NO: 158489 - DNA, 20 bp, synthetic construct
  source 1..20: mol_type = other DNA
agtttaatacccatctgtga

SEQ ID NO: 158490 - DNA, 20 bp, synthetic construct
  source 1..20: mol_type = other DNA
aagtttaatacccatctgtg

SEQ ID NO: 158491 - DNA, 20 bp, synthetic construct
  source 1..20: mol_type = other DNA
caagtttaatacccatctgt

SEQ ID NO: 158492 - DNA, 20 bp, synthetic construct
  source 1..20: mol_type = other DNA
acaagtttaatacccatctg

SEQ ID NO: 158493 - DNA, 20 bp, synthetic construct
  source 1..20: mol_type = other DNA
gacaagtttaatacccatct

SEQ ID NO: 158494 - DNA, 20 bp, synthetic construct
  source 1..20: mol_type = other DNA
tgacaagtttaatacccatc

SEQ ID NO: 158495 - DNA, 20 bp, synthetic construct
  source 1..20: mol_type = other DNA
ctgacaagtttaatacccat

SEQ ID NO: 158496 - DNA, 20 bp, synthetic construct
  source 1..20: mol_type = other DNA
tctgacaagtttaataccca

SEQ ID NO: 158497 - DNA, 20 bp, synthetic construct
  source 1..20: mol_type = other DNA
ttctgacaagtttaataccc

SEQ ID NO: 158498 - DNA, 20 bp, synthetic construct
  source 1..20: mol_type = other DNA
attctgacaagtttaatacc

SEQ ID NO: 158499 - DNA, 20 bp, synthetic construct
  source 1..20: mol_type = other DNA
aattctgacaagtttaatac

SEQ ID NO: 158500 - DNA, 20 bp, synthetic construct
  source 1..20: mol_type = other DNA
aaattctgacaagtttaata

SEQ ID NO: 158501 - DNA, 20 bp, synthetic construct
  source 1..20: mol_type = other DNA
gaaattctgacaagtttaat

SEQ ID NO: 158502 - DNA, 20 bp, synthetic construct
  source 1..20: mol_type = other DNA
agaaattctgacaagtttaa

SEQ ID NO: 158503 - DNA, 20 bp, synthetic construct
  source 1..20: mol_type = other DNA
aagaaattctgacaagttta

SEQ ID NO: 158504 - DNA, 20 bp, synthetic construct
  source 1..20: mol_type = other DNA
aaagaaattctgacaagttt

SEQ ID NO: 158505 - DNA, 20 bp, synthetic construct
  source 1..20: mol_type = other DNA
caaagaaattctgacaagtt

SEQ ID NO: 158506 - DNA, 20 bp, synthetic construct
  source 1..20: mol_type = other DNA
acaaagaaattctgacaagt

SEQ ID NO: 158507 - DNA, 20 bp, synthetic construct
  source 1..20: mol_type = other DNA
gacaaagaaattctgacaag

SEQ ID NO: 158508 - DNA, 20 bp, synthetic construct
  source 1..20: mol_type = other DNA
tgacaaagaaattctgacaa

SEQ ID NO: 158509 - DNA, 20 bp, synthetic construct
  source 1..20: mol_type = other DNA
atgacaaagaaattctgaca

SEQ ID NO: 158510 - DNA, 20 bp, synthetic construct
  source 1..20: mol_type = other DNA
aatgacaaagaaattctgac

SEQ ID NO: 158511 - DNA, 20 bp, synthetic construct
  source 1..20: mol_type = other DNA
gaatgacaaagaaattctga

SEQ ID NO: 158512 - DNA, 20 bp, synthetic construct
  source 1..20: mol_type = other DNA
tgaatgacaaagaaattctg

SEQ ID NO: 158513 - DNA, 20 bp, synthetic construct
  source 1..20: mol_type = other DNA
ttgaatgacaaagaaattct

SEQ ID NO: 158514 - DNA, 20 bp, synthetic construct
  source 1..20: mol_type = other DNA
cttgaatgacaaagaaattc

SEQ ID NO: 158515 - DNA, 20 bp, synthetic construct
  source 1..20: mol_type = other DNA
gcttgaatgacaaagaaatt

SEQ ID NO: 158516 - DNA, 20 bp, synthetic construct
  source 1..20: mol_type = other DNA
ggcttgaatgacaaagaaat

SEQ ID NO: 158517 - DNA, 20 bp, synthetic construct
  source 1..20: mol_type = other DNA
aggcttgaatgacaaagaaa

SEQ ID NO: 158518 - DNA, 20 bp, synthetic construct
  source 1..20: mol_type = other DNA
caggcttgaatgacaaagaa

SEQ ID NO: 158519 - DNA, 20 bp, synthetic construct
  source 1..20: mol_type = other DNA
acaggcttgaatgacaaaga

SEQ ID NO: 158520 - DNA, 20 bp, synthetic construct
  source 1..20: mol_type = other DNA
cacaggcttgaatgacaaag

SEQ ID NO: 158521 - DNA, 20 bp, synthetic construct
  source 1..20: mol_type = other DNA
tcacaggcttgaatgacaaa

SEQ ID NO: 158522 - DNA, 20 bp, synthetic construct
  source 1..20: mol_type = other DNA
ttcacaggcttgaatgacaa

SEQ ID NO: 158523 - DNA, 20 bp, synthetic construct
  source 1..20: mol_type = other DNA
attcacaggcttgaatgaca

SEQ ID NO: 158524 - DNA, 20 bp, synthetic construct
  source 1..20: mol_type = other DNA
tattcacaggcttgaatgac

SEQ ID NO: 158525 - DNA, 20 bp, synthetic construct
  source 1..20: mol_type = other DNA
ttattcacaggcttgaatga

SEQ ID NO: 158526 - DNA, 20 bp, synthetic construct
  source 1..20: mol_type = other DNA
tttattcacaggcttgaatg

SEQ ID NO: 158527 - DNA, 20 bp, synthetic construct
  source 1..20: mol_type = other DNA
ttttattcacaggcttgaat

SEQ ID NO: 158528 - DNA, 20 bp, synthetic construct
  source 1..20: mol_type = other DNA
tttttattcacaggcttgaa

SEQ ID NO: 158529 - DNA, 20 bp, synthetic construct
  source 1..20: mol_type = other DNA
gtttttattcacaggcttga

SEQ ID NO: 158530 - DNA, 20 bp, synthetic construct
  source 1..20: mol_type = other DNA
ggtttttattcacaggcttg

SEQ ID NO: 158531 - DNA, 20 bp, synthetic construct
  source 1..20: mol_type = other DNA
gggtttttattcacaggctt

SEQ ID NO: 158532 - DNA, 20 bp, synthetic construct
  source 1..20: mol_type = other DNA
agggtttttattcacaggct

SEQ ID NO: 158533 - DNA, 20 bp, synthetic construct
  source 1..20: mol_type = other DNA
cagggtttttattcacaggc

SEQ ID NO: 158534 - DNA, 20 bp, synthetic construct
  source 1..20: mol_type = other DNA
acagggtttttattcacagg

SEQ ID NO: 158535 - DNA, 20 bp, synthetic construct
  source 1..20: mol_type = other DNA
tacagggtttttattcacag

SEQ ID NO: 158536 - DNA, 20 bp, synthetic construct
  source 1..20: mol_type = other DNA
atacagggtttttattcaca

SEQ ID NO: 158537 - DNA, 20 bp, synthetic construct
  source 1..20: mol_type = other DNA
catacagggtttttattcac

SEQ ID NO: 158538 - DNA, 20 bp, synthetic construct
  source 1..20: mol_type = other DNA
ccatacagggtttttattca

SEQ ID NO: 158539 - DNA, 20 bp, synthetic construct
  source 1..20: mol_type = other DNA
gccatacagggtttttattc

SEQ ID NO: 158540 - DNA, 20 bp, synthetic construct
  source 1..20: mol_type = other DNA
tgccatacagggtttttatt

SEQ ID NO: 158541 - DNA, 20 bp, synthetic construct
  source 1..20: mol_type = other DNA
gtgccatacagggtttttat

SEQ ID NO: 158542 - DNA, 20 bp, synthetic construct
  source 1..20: mol_type = other DNA
agtgccatacagggttttta

SEQ ID NO: 158543 - DNA, 20 bp, synthetic construct
  source 1..20: mol_type = other DNA
aagtgccatacagggttttt

SEQ ID NO: 158544 - DNA, 20 bp, synthetic construct
  source 1..20: mol_type = other DNA
taagtgccatacagggtttt

SEQ ID NO: 158545 - DNA, 20 bp, synthetic construct
  source 1..20: mol_type = other DNA
ataagtgccatacagggttt

SEQ ID NO: 158546 - DNA, 20 bp, synthetic construct
  source 1..20: mol_type = other DNA
aataagtgccatacagggtt

SEQ ID NO: 158547 - DNA, 20 bp, synthetic construct
  source 1..20: mol_type = other DNA
taataagtgccatacagggt

SEQ ID NO: 158548 - DNA, 20 bp, synthetic construct
  source 1..20: mol_type = other DNA
ataataagtgccatacaggg

SEQ ID NO: 158549 - DNA, 20 bp, synthetic construct
  source 1..20: mol_type = other DNA
cataataagtgccatacagg

SEQ ID NO: 158550 - DNA, 20 bp, synthetic construct
  source 1..20: mol_type = other DNA
tcataataagtgccatacag

SEQ ID NO: 158551 - DNA, 20 bp, synthetic construct
  source 1..20: mol_type = other DNA
ctcataataagtgccataca

SEQ ID NO: 158552 - DNA, 20 bp, synthetic construct
  source 1..20: mol_type = other DNA
cctcataataagtgccatac

SEQ ID NO: 158553 - DNA, 20 bp, synthetic construct
  source 1..20: mol_type = other DNA
gcctcataataagtgccata

SEQ ID NO: 158554 - DNA, 20 bp, synthetic construct
  source 1..20: mol_type = other DNA
agcctcataataagtgccat

SEQ ID NO: 158555 - DNA, 20 bp, synthetic construct
  source 1..20: mol_type = other DNA
tagcctcataataagtgcca

SEQ ID NO: 158556 - DNA, 20 bp, synthetic construct
  source 1..20: mol_type = other DNA
atagcctcataataagtgcc

SEQ ID NO: 158557 - DNA, 20 bp, synthetic construct
  source 1..20: mol_type = other DNA
aatagcctcataataagtgc

SEQ ID NO: 158558 - DNA, 20 bp, synthetic construct
  source 1..20: mol_type = other DNA
taatagcctcataataagtg

SEQ ID NO: 158559 - DNA, 20 bp, synthetic construct
  source 1..20: mol_type = other DNA
ttaatagcctcataataagt

SEQ ID NO: 158560 - DNA, 20 bp, synthetic construct
  source 1..20: mol_type = other DNA
tttaatagcctcataataag

SEQ ID NO: 158561 - DNA, 20 bp, synthetic construct
  source 1..20: mol_type = other DNA
ttttaatagcctcataataa

SEQ ID NO: 158562 - DNA, 20 bp, synthetic construct
  source 1..20: mol_type = other DNA
cttttaatagcctcataata

SEQ ID NO: 158563 - DNA, 20 bp, synthetic construct
  source 1..20: mol_type = other DNA
tcttttaatagcctcataat

SEQ ID NO: 158564 - DNA, 20 bp, synthetic construct
  source 1..20: mol_type = other DNA
ttcttttaatagcctcataa

SEQ ID NO: 158565 - DNA, 20 bp, synthetic construct
  source 1..20: mol_type = other DNA
attcttttaatagcctcata

SEQ ID NO: 158566 - DNA, 20 bp, synthetic construct
  source 1..20: mol_type = other DNA
gattcttttaatagcctcat

SEQ ID NO: 158567 - DNA, 20 bp, synthetic construct
  source 1..20: mol_type = other DNA
ggattcttttaatagcctca

SEQ ID NO: 158568 - DNA, 20 bp, synthetic construct
  source 1..20: mol_type = other DNA
tggattcttttaatagcctc

SEQ ID NO: 158569 - DNA, 20 bp, synthetic construct
  source 1..20: mol_type = other DNA
ttggattcttttaatagcct

SEQ ID NO: 158570 - DNA, 20 bp, synthetic construct
  source 1..20: mol_type = other DNA
tttggattcttttaatagcc

SEQ ID NO: 158571 - DNA, 20 bp, synthetic construct
  source 1..20: mol_type = other DNA
atttggattcttttaatagc

SEQ ID NO: 158572 - DNA, 20 bp, synthetic construct
  source 1..20: mol_type = other DNA
aatttggattcttttaatag

SEQ ID NO: 158573 - DNA, 20 bp, synthetic construct
  source 1..20: mol_type = other DNA
gaatttggattcttttaata

SEQ ID NO: 158574 - DNA, 20 bp, synthetic construct
  source 1..20: mol_type = other DNA
tgaatttggattcttttaat

SEQ ID NO: 158575 - DNA, 20 bp, synthetic construct
  source 1..20: mol_type = other DNA
ttgaatttggattcttttaa

SEQ ID NO: 158576 - DNA, 20 bp, synthetic construct
  source 1..20: mol_type = other DNA
tttgaatttggattctttta

SEQ ID NO: 158577 - DNA, 20 bp, synthetic construct
  source 1..20: mol_type = other DNA
gtttgaatttggattctttt

SEQ ID NO: 158578 - DNA, 20 bp, synthetic construct
  source 1..20: mol_type = other DNA
agtttgaatttggattcttt

SEQ ID NO: 158579 - DNA, 20 bp, synthetic construct
  source 1..20: mol_type = other DNA
tagtttgaatttggattctt

SEQ ID NO: 158580 - DNA, 20 bp, synthetic construct
  source 1..20: mol_type = other DNA
ttagtttgaatttggattct

SEQ ID NO: 158581 - DNA, 20 bp, synthetic construct
  source 1..20: mol_type = other DNA
tttagtttgaatttggattc

SEQ ID NO: 158582 - DNA, 20 bp, Homo sapiens
  source 1..20: mol_type = genomic DNA
gcgtcgtagtctcctgcagc

SEQ ID NO: 158583 - DNA, 20 bp, Homo sapiens
  source 1..20: mol_type = genomic DNA
cgtcgtagtctcctgcagcg

SEQ ID NO: 158584 - DNA, 20 bp, Homo sapiens
  source 1..20: mol_type = genomic DNA
gtcgtagtctcctgcagcgt

SEQ ID NO: 158585 - DNA, 20 bp, Homo sapiens
  source 1..20: mol_type = genomic DNA
tcgtagtctcctgcagcgtc

SEQ ID NO: 158586 - DNA, 20 bp, Homo sapiens
  source 1..20: mol_type = genomic DNA
cgtagtctcctgcagcgtct

SEQ ID NO: 158587 - DNA, 20 bp, Homo sapiens
  source 1..20: mol_type = genomic DNA
gtagtctcctgcagcgtctg

SEQ ID NO: 158588 - DNA, 20 bp, Homo sapiens
  source 1..20: mol_type = genomic DNA
tagtctcctgcagcgtctgg

SEQ ID NO: 158589 - DNA, 20 bp, Homo sapiens
  source 1..20: mol_type = genomic DNA
agtctcctgcagcgtctggg

SEQ ID NO: 158590 - DNA, 20 bp, Homo sapiens
  source 1..20: mol_type = genomic DNA
gtctcctgcagcgtctgggg

SEQ ID NO: 158591 - DNA, 20 bp, Homo sapiens
  source 1..20: mol_type = genomic DNA
tctcctgcagcgtctggggt

SEQ ID NO: 158592 - DNA, 20 bp, Homo sapiens
  source 1..20: mol_type = genomic DNA
ctcctgcagcgtctggggtt

SEQ ID NO: 158593 - DNA, 20 bp, Homo sapiens
  source 1..20: mol_type = genomic DNA
tcctgcagcgtctggggttt

SEQ ID NO: 158594 - DNA, 20 bp, Homo sapiens
  source 1..20: mol_type = genomic DNA
cctgcagcgtctggggtttc

SEQ ID NO: 158595 - DNA, 20 bp, Homo sapiens
  source 1..20: mol_type = genomic DNA
ctgcagcgtctggggtttcc

SEQ ID NO: 158596 - DNA, 20 bp, Homo sapiens
  source 1..20: mol_type = genomic DNA
tgcagcgtctggggtttccg

SEQ ID NO: 158597 - DNA, 20 bp, Homo sapiens
  source 1..20: mol_type = genomic DNA
gcagcgtctggggtttccgt

SEQ ID NO: 158598 - DNA, 20 bp, Homo sapiens
  source 1..20: mol_type = genomic DNA
cagcgtctggggtttccgtt

SEQ ID NO: 158599 - DNA, 20 bp, Homo sapiens
  source 1..20: mol_type = genomic DNA
agcgtctggggtttccgttg

SEQ ID NO: 158600 - DNA, 20 bp, Homo sapiens
  source 1..20: mol_type = genomic DNA
gcgtctggggtttccgttgc

SEQ ID NO: 158601 - DNA, 20 bp, Homo sapiens
  source 1..20: mol_type = genomic DNA
cgtctggggtttccgttgca

SEQ ID NO: 158602 - DNA, 20 bp, Homo sapiens
  source 1..20: mol_type = genomic DNA
gtctggggtttccgttgcag

SEQ ID NO: 158603 - DNA, 20 bp, Homo sapiens
  source 1..20: mol_type = genomic DNA
tctggggtttccgttgcagt

SEQ ID NO: 158604 - DNA, 20 bp, Homo sapiens
  source 1..20: mol_type = genomic DNA
ctggggtttccgttgcagtc

SEQ ID NO: 158605 - DNA, 20 bp, Homo sapiens
  source 1..20: mol_type = genomic DNA
tggggtttccgttgcagtcc

SEQ ID NO: 158606 - DNA, 20 bp, Homo sapiens
  source 1..20: mol_type = genomic DNA
ggggtttccgttgcagtcct

SEQ ID NO: 158607 - DNA, 20 bp, Homo sapiens
  source 1..20: mol_type = genomic DNA
gggtttccgttgcagtcctc

SEQ ID NO: 158608 - DNA, 20 bp, Homo sapiens
  source 1..20: mol_type = genomic DNA
ggtttccgttgcagtcctcg

SEQ ID NO: 158609 - DNA, 20 bp, Homo sapiens
  source 1..20: mol_type = genomic DNA
gtttccgttgcagtcctcgg

SEQ ID NO: 158610 - DNA, 20 bp, Homo sapiens
  source 1..20: mol_type = genomic DNA
tttccgttgcagtcctcgga

SEQ ID NO: 158611 - DNA, 20 bp, Homo sapiens
  source 1..20: mol_type = genomic DNA
ttccgttgcagtcctcggaa

SEQ ID NO: 158612 - DNA, 20 bp, Homo sapiens
  source 1..20: mol_type = genomic DNA
tccgttgcagtcctcggaac

SEQ ID NO: 158613 - DNA, 20 bp, Homo sapiens
  source 1..20: mol_type = genomic DNA
ccgttgcagtcctcggaacc

SEQ ID NO: 158614 - DNA, 20 bp, Homo sapiens
  source 1..20: mol_type = genomic DNA
cgttgcagtcctcggaacca

SEQ ID NO: 158615 - DNA, 20 bp, Homo sapiens
  source 1..20: mol_type = genomic DNA
gttgcagtcctcggaaccag

SEQ ID NO: 158616 - DNA, 20 bp, Homo sapiens
  source 1..20: mol_type = genomic DNA
ttgcagtcctcggaaccagg

SEQ ID NO: 158617 - DNA, 20 bp, Homo sapiens
  source 1..20: mol_type = genomic DNA
tgcagtcctcggaaccagga

SEQ ID NO: 158618 - DNA, 20 bp, Homo sapiens
  source 1..20: mol_type = genomic DNA
gcagtcctcggaaccaggac

SEQ ID NO: 158619 - DNA, 20 bp, Homo sapiens
  source 1..20: mol_type = genomic DNA
cagtcctcggaaccaggacc

SEQ ID NO: 158620 - DNA, 20 bp, Homo sapiens
  source 1..20: mol_type = genomic DNA
agtcctcggaaccaggacct

SEQ ID NO: 158621 - DNA, 20 bp, Homo sapiens
  source 1..20: mol_type = genomic DNA
gtcctcggaaccaggacctc

SEQ ID NO: 158622 - DNA, 20 bp, Homo sapiens
  source 1..20: mol_type = genomic DNA
tcctcggaaccaggacctcg

SEQ ID NO: 158623 - DNA, 20 bp, Homo sapiens
  source 1..20: mol_type = genomic DNA
cctcggaaccaggacctcgg

SEQ ID NO: 158624 - DNA, 20 bp, Homo sapiens
  source 1..20: mol_type = genomic DNA
ctcggaaccaggacctcggc

SEQ ID NO: 158625 - DNA, 20 bp, Homo sapiens
  source 1..20: mol_type = genomic DNA
tcggaaccaggacctcggcg

SEQ ID NO: 158626 - DNA, 20 bp, Homo sapiens
  source 1..20: mol_type = genomic DNA
cggaaccaggacctcggcgt

SEQ ID NO: 158627 - DNA, 20 bp, Homo sapiens
  source 1..20: mol_type = genomic DNA
ggaaccaggacctcggcgtg

SEQ ID NO: 158628 - DNA, 20 bp, Homo sapiens
  source 1..20: mol_type = genomic DNA
gaaccaggacctcggcgtgg

SEQ ID NO: 158629 - DNA, 20 bp, Homo sapiens
  source 1..20: mol_type = genomic DNA
aaccaggacctcggcgtggc

SEQ ID NO: 158630 - DNA, 20 bp, Homo sapiens
  source 1..20: mol_type = genomic DNA
accaggacctcggcgtggcc

SEQ ID NO: 158631 - DNA, 20 bp, Homo sapiens
  source 1..20: mol_type = genomic DNA
ccaggacctcggcgtggcct

SEQ ID NO: 158632 - DNA, 20 bp, Homo sapiens
  source 1..20: mol_type = genomic DNA
caggacctcggcgtggccta

SEQ ID NO: 158633 - DNA, 20 bp, Homo sapiens
  source 1..20: mol_type = genomic DNA
aggacctcggcgtggcctag

SEQ ID NO: 158634 - DNA, 20 bp, Homo sapiens
  source 1..20: mol_type = genomic DNA
ggacctcggcgtggcctagc

SEQ ID NO: 158635 - DNA, 20 bp, Homo sapiens
  source 1..20: mol_type = genomic DNA
gacctcggcgtggcctagcg

SEQ ID NO: 158636 - DNA, 20 bp, Homo sapiens
  source 1..20: mol_type = genomic DNA
acctcggcgtggcctagcga

SEQ ID NO: 158637 - DNA, 20 bp, Homo sapiens
  source 1..20: mol_type = genomic DNA
cctcggcgtggcctagcgag

SEQ ID NO: 158638 - DNA, 20 bp, Homo sapiens
  source 1..20: mol_type = genomic DNA
ctcggcgtggcctagcgagt

SEQ ID NO: 158639 - DNA, 20 bp, Homo sapiens
  source 1..20: mol_type = genomic DNA
tcggcgtggcctagcgagtt

SEQ ID NO: 158640 - DNA, 20 bp, Homo sapiens
  source 1..20: mol_type = genomic DNA
cggcgtggcctagcgagtta

SEQ ID NO: 158641 - DNA, 20 bp, Homo sapiens
  source 1..20: mol_type = genomic DNA
ggcgtggcctagcgagttat

SEQ ID NO: 158642 - DNA, 20 bp, Homo sapiens
  source 1..20: mol_type = genomic DNA
gcgtggcctagcgagttatg

SEQ ID NO: 158643 - DNA, 20 bp, Homo sapiens
  source 1..20: mol_type = genomic DNA
cgtggcctagcgagttatgg

SEQ ID NO: 158644 - DNA, 20 bp, Homo sapiens
  source 1..20: mol_type = genomic DNA
gtggcctagcgagttatggc

SEQ ID NO: 158645 - DNA, 20 bp, Homo sapiens
  source 1..20: mol_type = genomic DNA
tggcctagcgagttatggcg

SEQ ID NO: 158646 - DNA, 20 bp, Homo sapiens
  source 1..20: mol_type = genomic DNA
ggcctagcgagttatggcga

SEQ ID NO: 158647 - DNA, 20 bp, Homo sapiens
  source 1..20: mol_type = genomic DNA
gcctagcgagttatggcgac

SEQ ID NO: 158648 - DNA, 20 bp, Homo sapiens
  source 1..20: mol_type = genomic DNA
cctagcgagttatggcgacg

SEQ ID NO: 158649 - DNA, 20 bp, Homo sapiens
  source 1..20: mol_type = genomic DNA
ctagcgagttatggcgacga

SEQ ID NO: 158650 - DNA, 20 bp, Homo sapiens
  source 1..20: mol_type = genomic DNA
tagcgagttatggcgacgaa

SEQ ID NO: 158651 - DNA, 20 bp, Homo sapiens
  source 1..20: mol_type = genomic DNA
agcgagttatggcgacgaag

SEQ ID NO: 158652 - DNA, 20 bp, Homo sapiens
  source 1..20: mol_type = genomic DNA
gcgagttatggcgacgaagg

SEQ ID NO: 158653 - DNA, 20 bp, Homo sapiens
  source 1..20: mol_type = genomic DNA
cgagttatggcgacgaaggc

SEQ ID NO: 158654 - DNA, 20 bp, Homo sapiens
  source 1..20: mol_type = genomic DNA
gagttatggcgacgaaggcc

SEQ ID NO: 158655 - DNA, 20 bp, Homo sapiens
  source 1..20: mol_type = genomic DNA
agttatggcgacgaaggccg

SEQ ID NO: 158656 - DNA, 20 bp, Homo sapiens
  source 1..20: mol_type = genomic DNA
gttatggcgacgaaggccgt

SEQ ID NO: 158657 - DNA, 20 bp, Homo sapiens
  source 1..20: mol_type = genomic DNA
ttatggcgacgaaggccgtg

SEQ ID NO: 158658 - DNA, 20 bp, Homo sapiens
  source 1..20: mol_type = genomic DNA
tatggcgacgaaggccgtgt

SEQ ID NO: 158659 - DNA, 20 bp, Homo sapiens
  source 1..20: mol_type = genomic DNA
atggcgacgaaggccgtgtg

SEQ ID NO: 158660 - DNA, 20 bp, Homo sapiens
  source 1..20: mol_type = genomic DNA
tggcgacgaaggccgtgtgc

SEQ ID NO: 158661 - DNA, 20 bp, Homo sapiens
  source 1..20: mol_type = genomic DNA
ggcgacgaaggccgtgtgcg

SEQ ID NO: 158662 - DNA, 20 bp, Homo sapiens
  source 1..20: mol_type = genomic DNA
gcgacgaaggccgtgtgcgt

SEQ ID NO: 158663 - DNA, 20 bp, Homo sapiens
  source 1..20: mol_type = genomic DNA
cgacgaaggccgtgtgcgtg

SEQ ID NO: 158664 - DNA, 20 bp, Homo sapiens
  source 1..20: mol_type = genomic DNA
gacgaaggccgtgtgcgtgc

SEQ ID NO: 158665 - DNA, 20 bp, Homo sapiens
  source 1..20: mol_type = genomic DNA
acgaaggccgtgtgcgtgct

SEQ ID NO: 158666 - DNA, 20 bp, Homo sapiens
  source 1..20: mol_type = genomic DNA
cgaaggccgtgtgcgtgctg

SEQ ID NO: 158667 - DNA, 20 bp, Homo sapiens
  source 1..20: mol_type = genomic DNA
gaaggccgtgtgcgtgctga

SEQ ID NO: 158668 - DNA, 20 bp, Homo sapiens
  source 1..20: mol_type = genomic DNA
aaggccgtgtgcgtgctgaa

SEQ ID NO: 158669 - DNA, 20 bp, Homo sapiens
  source 1..20: mol_type = genomic DNA
aggccgtgtgcgtgctgaag

SEQ ID NO: 158670 - DNA, 20 bp, Homo sapiens
  source 1..20: mol_type = genomic DNA
ggccgtgtgcgtgctgaagg

SEQ ID NO: 158671 - DNA, 20 bp, Homo sapiens
  source 1..20: mol_type = genomic DNA
gccgtgtgcgtgctgaaggg

SEQ ID NO: 158672 - DNA, 20 bp, Homo sapiens
  source 1..20: mol_type = genomic DNA
ccgtgtgcgtgctgaagggc

SEQ ID NO: 158673 - DNA, 20 bp, Homo sapiens
  source 1..20: mol_type = genomic DNA
cgtgtgcgtgctgaagggcg

SEQ ID NO: 158674 - DNA, 20 bp, Homo sapiens
  source 1..20: mol_type = genomic DNA
gtgtgcgtgctgaagggcga

SEQ ID NO: 158675 - DNA, 20 bp, Homo sapiens
  source 1..20: mol_type = genomic DNA
tgtgcgtgctgaagggcgac

SEQ ID NO: 158676 - DNA, 20 bp, Homo sapiens
  source 1..20: mol_type = genomic DNA
gtgcgtgctgaagggcgacg

SEQ ID NO: 158677 - DNA, 20 bp, Homo sapiens
  source 1..20: mol_type = genomic DNA
tgcgtgctgaagggcgacgg

SEQ ID NO: 158678 - DNA, 20 bp, Homo sapiens
  source 1..20: mol_type = genomic DNA
gcgtgctgaagggcgacggc

SEQ ID NO: 158679 - DNA, 20 bp, Homo sapiens
  source 1..20: mol_type = genomic DNA
cgtgctgaagggcgacggcc

SEQ ID NO: 158680 - DNA, 20 bp, Homo sapiens
  source 1..20: mol_type = genomic DNA
gtgctgaagggcgacggccc

SEQ ID NO: 158681 - DNA, 20 bp, Homo sapiens
  source 1..20: mol_type = genomic DNA
tgctgaagggcgacggccca

SEQ ID NO: 158682 - DNA, 20 bp, Homo sapiens
  source 1..20: mol_type = genomic DNA
gctgaagggcgacggcccag

SEQ ID NO: 158683 - DNA, 20 bp, Homo sapiens
  source 1..20: mol_type = genomic DNA
ctgaagggcgacggcccagt

SEQ ID NO: 158684 - DNA, 20 bp, Homo sapiens
  source 1..20: mol_type = genomic DNA
tgaagggcgacggcccagtg

SEQ ID NO: 158685 - DNA, 20 bp, Homo sapiens
  source 1..20: mol_type = genomic DNA
gaagggcgacggcccagtgc

SEQ ID NO: 158686 - DNA, 20 bp, Homo sapiens
  source 1..20: mol_type = genomic DNA
aagggcgacggcccagtgca

SEQ ID NO: 158687 - DNA, 20 bp, Homo sapiens
  source 1..20: mol_type = genomic DNA
agggcgacggcccagtgcag

SEQ ID NO: 158688 - DNA, 20 bp, Homo sapiens
  source 1..20: mol_type = genomic DNA
gggcgacggcccagtgcagg

SEQ ID NO: 158689 - DNA, 20 bp, Homo sapiens
  source 1..20: mol_type = genomic DNA
ggcgacggcccagtgcaggg

SEQ ID NO: 158690 - DNA, 20 bp, Homo sapiens
  source 1..20: mol_type = genomic DNA
gcgacggcccagtgcagggc

SEQ ID NO: 158691 - DNA, 20 bp, Homo sapiens
  source 1..20: mol_type = genomic DNA
cgacggcccagtgcagggca

SEQ ID NO: 158692 - DNA, 20 bp, Homo sapiens
  source 1..20: mol_type = genomic DNA
gacggcccagtgcagggcat

SEQ ID NO: 158693 - DNA, 20 bp, Homo sapiens
  source 1..20: mol_type = genomic DNA
acggcccagtgcagggcatc

SEQ ID NO: 158694 - DNA, 20 bp, Homo sapiens
  source 1..20: mol_type = genomic DNA
cggcccagtgcagggcatca

SEQ ID NO: 158695 - DNA, 20 bp, Homo sapiens
  source 1..20: mol_type = genomic DNA
ggcccagtgcagggcatcat

SEQ ID NO: 158696 - DNA, 20 bp, Homo sapiens
  source 1..20: mol_type = genomic DNA
gcccagtgcagggcatcatc

SEQ ID NO: 158697 - DNA, 20 bp, Homo sapiens
  source 1..20: mol_type = genomic DNA
cccagtgcagggcatcatca

SEQ ID NO: 158698 - DNA, 20 bp, Homo sapiens
  source 1..20: mol_type = genomic DNA
ccagtgcagggcatcatcaa

SEQ ID NO: 158699 - DNA, 20 bp, Homo sapiens
  source 1..20: mol_type = genomic DNA
cagtgcagggcatcatcaat

SEQ ID NO: 158700 - DNA, 20 bp, Homo sapiens
  source 1..20: mol_type = genomic DNA
agtgcagggcatcatcaatt

SEQ ID NO: 158701 - DNA, 20 bp, Homo sapiens
  source 1..20: mol_type = genomic DNA
gtgcagggcatcatcaattt

SEQ ID NO: 158702 - DNA, 20 bp, Homo sapiens
  source 1..20: mol_type = genomic DNA
tgcagggcatcatcaatttc

SEQ ID NO: 158703 - DNA, 20 bp, Homo sapiens
  source 1..20: mol_type = genomic DNA
gcagggcatcatcaatttcg

SEQ ID NO: 158704 - DNA, 20 bp, Homo sapiens
  source 1..20: mol_type = genomic DNA
cagggcatcatcaatttcga

SEQ ID NO: 158705 - DNA, 20 bp, Homo sapiens
  source 1..20: mol_type = genomic DNA
agggcatcatcaatttcgag

SEQ ID NO: 158706 - DNA, 20 bp, Homo sapiens
  source 1..20: mol_type = genomic DNA
gggcatcatcaatttcgagc

SEQ ID NO: 158707 - DNA, 20 bp, Homo sapiens
  source 1..20: mol_type = genomic DNA
ggcatcatcaatttcgagca

SEQ ID NO: 158708 - DNA, 20 bp, Homo sapiens
  source 1..20: mol_type = genomic DNA
gcatcatcaatttcgagcag

SEQ ID NO: 158709 - DNA, 20 bp, Homo sapiens
  source 1..20: mol_type = genomic DNA
catcatcaatttcgagcaga

SEQ ID NO: 158710 - DNA, 20 bp, Homo sapiens
  source 1..20: mol_type = genomic DNA
atcatcaatttcgagcagaa

SEQ ID NO: 158711 - DNA, 20 bp, Homo sapiens
  source 1..20: mol_type = genomic DNA
tcatcaatttcgagcagaag

SEQ ID NO: 158712 - DNA, 20 bp, Homo sapiens
  source 1..20: mol_type = genomic DNA
catcaatttcgagcagaagg

SEQ ID NO: 158713 - DNA, 20 bp, Homo sapiens
  source 1..20: mol_type = genomic DNA
atcaatttcgagcagaaggc

SEQ ID NO: 158714 - DNA, 20 bp, Homo sapiens
  source 1..20: mol_type = genomic DNA
tcaatttcgagcagaaggca

SEQ ID NO: 158715 - DNA, 20 bp, Homo sapiens
  source 1..20: mol_type = genomic DNA
caatttcgagcagaaggcaa

SEQ ID NO: 158716 - DNA, 20 bp, Homo sapiens
  source 1..20: mol_type = genomic DNA
aatttcgagcagaaggcaag

SEQ ID NO: 158717 - DNA, 20 bp, Homo sapiens
  source 1..20: mol_type = genomic DNA
atttcgagcagaaggcaagg

SEQ ID NO: 158718 - DNA, 20 bp, Homo sapiens
  source 1..20: mol_type = genomic DNA
tttcgagcagaaggcaaggg

SEQ ID NO: 158719 - DNA, 20 bp, Homo sapiens
  source 1..20: mol_type = genomic DNA
ttcgagcagaaggcaagggc

SEQ ID NO: 158720 - DNA, 20 bp, Homo sapiens
  source 1..20: mol_type = genomic DNA
tcgagcagaaggcaagggct

SEQ ID NO: 158721 - DNA, 20 bp, Homo sapiens
  source 1..20: mol_type = genomic DNA
cgagcagaaggcaagggctg

SEQ ID NO: 158722 - DNA, 20 bp, Homo sapiens
  source 1..20: mol_type = genomic DNA
gagcagaaggcaagggctgg

SEQ ID NO: 158723 - DNA, 20 bp, Homo sapiens
  source 1..20: mol_type = genomic DNA
agcagaaggcaagggctggg

SEQ ID NO: 158724 - DNA, 20 bp, Homo sapiens
  source 1..20: mol_type = genomic DNA
gcagaaggcaagggctggga

SEQ ID NO: 158725 - DNA, 20 bp, Homo sapiens
  source 1..20: mol_type = genomic DNA
cagaaggcaagggctgggac

SEQ ID NO: 158726 - DNA, 20 bp, Homo sapiens
  source 1..20: mol_type = genomic DNA
agaaggcaagggctgggacg

SEQ ID NO: 158727 - DNA, 20 bp, Homo sapiens
  source 1..20: mol_type = genomic DNA
gaaggcaagggctgggacgg

SEQ ID NO: 158728 - DNA, 20 bp, Homo sapiens
  source 1..20: mol_type = genomic DNA
aaggcaagggctgggacgga

SEQ ID NO: 158729 - DNA, 20 bp, Homo sapiens
  source 1..20: mol_type = genomic DNA
aggcaagggctgggacggag

SEQ ID NO: 158730 - DNA, 20 bp, Homo sapiens
  source 1..20: mol_type = genomic DNA
ggcaagggctgggacggagg

SEQ ID NO: 158731 - DNA, 20 bp, Homo sapiens
  source 1..20: mol_type = genomic DNA
gcaagggctgggacggaggc

SEQ ID NO: 158732 - DNA, 20 bp, Homo sapiens
  source 1..20: mol_type = genomic DNA
caagggctgggacggaggct

SEQ ID NO: 158733 - DNA, 20 bp, Homo sapiens
  source 1..20: mol_type = genomic DNA
aagggctgggacggaggctt

SEQ ID NO: 158734 - DNA, 20 bp, Homo sapiens
  source 1..20: mol_type = genomic DNA
agggctgggacggaggcttg

SEQ ID NO: 158735 - DNA, 20 bp, Homo sapiens
  source 1..20: mol_type = genomic DNA
gggctgggacggaggcttgt

SEQ ID NO: 158736 - DNA, 20 bp, Homo sapiens
  source 1..20: mol_type = genomic DNA
ggctgggacggaggcttgtt

SEQ ID NO: 158737 - DNA, 20 bp, Homo sapiens
  source 1..20: mol_type = genomic DNA
gctgggacggaggcttgttt

SEQ ID NO: 158738 - DNA, 20 bp, Homo sapiens
  source 1..20: mol_type = genomic DNA
ctgggacggaggcttgtttg

SEQ ID NO: 158739 - DNA, 20 bp, Homo sapiens
  source 1..20: mol_type = genomic DNA
tgggacggaggcttgtttgc

SEQ ID NO: 158740 - DNA, 20 bp, Homo sapiens
  source 1..20: mol_type = genomic DNA
gggacggaggcttgtttgcg

SEQ ID NO: 158741 - DNA, 20 bp, Homo sapiens
  source 1..20: mol_type = genomic DNA
ggacggaggcttgtttgcga

SEQ ID NO: 158742 - DNA, 20 bp, Homo sapiens
  source 1..20: mol_type = genomic DNA
gacggaggcttgtttgcgag

SEQ ID NO: 158743 - DNA, 20 bp, Homo sapiens
  source 1..20: mol_type = genomic DNA
acggaggcttgtttgcgagg

SEQ ID NO: 158744 - DNA, 20 bp, Homo sapiens
  source 1..20: mol_type = genomic DNA
cggaggcttgtttgcgaggc

SEQ ID NO: 158745 - DNA, 20 bp, Homo sapiens
  source 1..20: mol_type = genomic DNA
ggaggcttgtttgcgaggcc

SEQ ID NO: 158746 - DNA, 20 bp, Homo sapiens
  source 1..20: mol_type = genomic DNA
gaggcttgtttgcgaggccg

SEQ ID NO: 158747 - DNA, 20 bp, Homo sapiens
  source 1..20: mol_type = genomic DNA
aggcttgtttgcgaggccgc

SEQ ID NO: 158748 - DNA, 20 bp, Homo sapiens
  source 1..20: mol_type = genomic DNA
ggcttgtttgcgaggccgct

SEQ ID NO: 158749 - DNA, 20 bp, Homo sapiens
  source 1..20: mol_type = genomic DNA
gcttgtttgcgaggccgctc

SEQ ID NO: 158750 - DNA, 20 bp, Homo sapiens
  source 1..20: mol_type = genomic DNA
cttgtttgcgaggccgctcc

SEQ ID NO: 158751 - DNA, 20 bp, Homo sapiens
  source 1..20: mol_type = genomic DNA
ttgtttgcgaggccgctccc

SEQ ID NO: 158752 - DNA, 20 bp, Homo sapiens
  source 1..20: mol_type = genomic DNA
tgtttgcgaggccgctccca

SEQ ID NO: 158753 - DNA, 20 bp, Homo sapiens
  source 1..20: mol_type = genomic DNA
gtttgcgaggccgctcccac

SEQ ID NO: 158754 - DNA, 20 bp, Homo sapiens
  source 1..20: mol_type = genomic DNA
tttgcgaggccgctcccacc

SEQ ID NO: 158755 - DNA, 20 bp, Homo sapiens
  source 1..20: mol_type = genomic DNA
ttgcgaggccgctcccaccc

SEQ ID NO: 158756 - DNA, 20 bp, Homo sapiens
  source 1..20: mol_type = genomic DNA
tgcgaggccgctcccacccg

SEQ ID NO: 158757 - DNA, 20 bp, Homo sapiens
  source 1..20: mol_type = genomic DNA
gcgaggccgctcccacccgc

SEQ ID NO: 158758 - DNA, 20 bp, Homo sapiens
  source 1..20: mol_type = genomic DNA
cgaggccgctcccacccgct

SEQ ID NO: 158759 - DNA, 20 bp, Homo sapiens
  source 1..20: mol_type = genomic DNA
gaggccgctcccacccgctc

SEQ ID NO: 158760 - DNA, 20 bp, Homo sapiens
  source 1..20: mol_type = genomic DNA
aggccgctcccacccgctcg

SEQ ID NO: 158761 - DNA, 20 bp, Homo sapiens
  source 1..20: mol_type = genomic DNA
ggccgctcccacccgctcgt

SEQ ID NO: 158762 - DNA, 20 bp, Homo sapiens
  source 1..20: mol_type = genomic DNA
gccgctcccacccgctcgtc

SEQ ID NO: 158763 - DNA, 20 bp, Homo sapiens
  source 1..20: mol_type = genomic DNA
ccgctcccacccgctcgtcc

SEQ ID NO: 158764 - DNA, 20 bp, Homo sapiens
  source 1..20: mol_type = genomic DNA
cgctcccacccgctcgtccc

SEQ ID NO: 158765 - DNA, 20 bp, Homo sapiens
  source 1..20: mol_type = genomic DNA
gctcccacccgctcgtcccc

SEQ ID NO: 158766 - DNA, 20 bp, Homo sapiens
  source 1..20: mol_type = genomic DNA
ctcccacccgctcgtccccc

SEQ ID NO: 158767 - DNA, 20 bp, Homo sapiens
  source 1..20: mol_type = genomic DNA
tcccacccgctcgtcccccc

SEQ ID NO: 158768 - DNA, 20 bp, Homo sapiens
  source 1..20: mol_type = genomic DNA
cccacccgctcgtccccccg

SEQ ID NO: 158769 - DNA, 20 bp, Homo sapiens
  source 1..20: mol_type = genomic DNA
ccacccgctcgtccccccgc

SEQ ID NO: 158770 - DNA, 20 bp, Homo sapiens
  source 1..20: mol_type = genomic DNA
cacccgctcgtccccccgcg

SEQ ID NO: 158771 - DNA, 20 bp, Homo sapiens
  source 1..20: mol_type = genomic DNA
acccgctcgtccccccgcgc

SEQ ID NO: 158772 - DNA, 20 bp, Homo sapiens
  source 1..20: mol_type = genomic DNA
cccgctcgtccccccgcgca

SEQ ID NO: 158773 - DNA, 20 bp, Homo sapiens
  source 1..20: mol_type = genomic DNA
ccgctcgtccccccgcgcac

SEQ ID NO: 158774 - DNA, 20 bp, Homo sapiens
  source 1..20: mol_type = genomic DNA
cgctcgtccccccgcgcacc

SEQ ID NO: 158775 - DNA, 20 bp, Homo sapiens
  source 1..20: mol_type = genomic DNA
gctcgtccccccgcgcacct

SEQ ID NO: 158776 - DNA, 20 bp, Homo sapiens
  source 1..20: mol_type = genomic DNA
ctcgtccccccgcgcacctt

SEQ ID NO: 158777 - DNA, 20 bp, Homo sapiens
  source 1..20: mol_type = genomic DNA
tcgtccccccgcgcaccttt

SEQ ID NO: 158778 - DNA, 20 bp, Homo sapiens
  source 1..20: mol_type = genomic DNA
cgtccccccgcgcacctttg

SEQ ID NO: 158779 - DNA, 20 bp, Homo sapiens
  source 1..20: mol_type = genomic DNA
gtccccccgcgcacctttgc

SEQ ID NO: 158780 - DNA, 20 bp, Homo sapiens
  source 1..20: mol_type = genomic DNA
tccccccgcgcacctttgct

SEQ ID NO: 158781 - DNA, 20 bp, Homo sapiens
  source 1..20: mol_type = genomic DNA
ccccccgcgcacctttgcta

SEQ ID NO: 158782 - DNA, 20 bp, Homo sapiens
  source 1..20: mol_type = genomic DNA
cccccgcgcacctttgctag

SEQ ID NO: 158783 - DNA, 20 bp, Homo sapiens
  source 1..20: mol_type = genomic DNA
ccccgcgcacctttgctagg

SEQ ID NO: 158784 - DNA, 20 bp, Homo sapiens
  source 1..20: mol_type = genomic DNA
cccgcgcacctttgctagga

SEQ ID NO: 158785 - DNA, 20 bp, Homo sapiens
  source 1..20: mol_type = genomic DNA
ccgcgcacctttgctaggag

SEQ ID NO: 158786 - DNA, 20 bp, Homo sapiens
  source 1..20: mol_type = genomic DNA
cgcgcacctttgctaggagc

SEQ ID NO: 158787 - DNA, 20 bp, Homo sapiens
  source 1..20: mol_type = genomic DNA
gcgcacctttgctaggagcg

SEQ ID NO: 158788 - DNA, 20 bp, Homo sapiens
  source 1..20: mol_type = genomic DNA
cgcacctttgctaggagcgg

SEQ ID NO: 158789 - DNA, 20 bp, Homo sapiens
  source 1..20: mol_type = genomic DNA
gcacctttgctaggagcggg

SEQ ID NO: 158790 - DNA, 20 bp, Homo sapiens
  source 1..20: mol_type = genomic DNA
cacctttgctaggagcgggt

SEQ ID NO: 158791 - DNA, 20 bp, Homo sapiens
  source 1..20: mol_type = genomic DNA
acctttgctaggagcgggtc

SEQ ID NO: 158792 - DNA, 20 bp, Homo sapiens
  source 1..20: mol_type = genomic DNA
cctttgctaggagcgggtcg

SEQ ID NO: 158793 - DNA, 20 bp, Homo sapiens
  source 1..20: mol_type = genomic DNA
ctttgctaggagcgggtcgc

SEQ ID NO: 158794 - DNA, 20 bp, Homo sapiens
  source 1..20: mol_type = genomic DNA
tttgctaggagcgggtcgcc

SEQ ID NO: 158795 - DNA, 20 bp, Homo sapiens
  source 1..20: mol_type = genomic DNA
ttgctaggagcgggtcgccc

SEQ ID NO: 158796 - DNA, 20 bp, Homo sapiens
  source 1..20: mol_type = genomic DNA
tgctaggagcgggtcgcccg

SEQ ID NO: 158797 - DNA, 20 bp, Homo sapiens
  source 1..20: mol_type = genomic DNA
gctaggagcgggtcgcccgc

SEQ ID NO: 158798 - DNA, 20 bp, Homo sapiens
  source 1..20: mol_type = genomic DNA
ctaggagcgggtcgcccgcc

SEQ ID NO: 158799 - DNA, 20 bp, Homo sapiens
  source 1..20: mol_type = genomic DNA
taggagcgggtcgcccgcca

SEQ ID NO: 158800 - DNA, 20 bp, Homo sapiens
  source 1..20: mol_type = genomic DNA
aggagcgggtcgcccgccag

SEQ ID NO: 158801 - DNA, 20 bp, Homo sapiens
  source 1..20: mol_type = genomic DNA
ggagcgggtcgcccgccagg

SEQ ID NO: 158802 - DNA, 20 bp, Homo sapiens
  source 1..20: mol_type = genomic DNA
gagcgggtcgcccgccaggc

SEQ ID NO: 158803 - DNA, 20 bp, Homo sapiens
  source 1..20: mol_type = genomic DNA
agcgggtcgcccgccaggcc

SEQ ID NO: 158804 - DNA, 20 bp, Homo sapiens
  source 1..20: mol_type = genomic DNA
gcgggtcgcccgccaggcct

SEQ ID NO: 158805 - DNA, 20 bp, Homo sapiens
  source 1..20: mol_type = genomic DNA
cgggtcgcccgccaggcctc

SEQ ID NO: 158806 - DNA, 20 bp, Homo sapiens
  source 1..20: mol_type = genomic DNA
gggtcgcccgccaggcctcg

SEQ ID NO: 158807 - DNA, 20 bp, Homo sapiens
  source 1..20: mol_type = genomic DNA
ggtcgcccgccaggcctcgg

SEQ ID NO: 158808 - DNA, 20 bp, Homo sapiens
  source 1..20: mol_type = genomic DNA
gtcgcccgccaggcctcggg

SEQ ID NO: 158809 - DNA, 20 bp, Homo sapiens
  source 1..20: mol_type = genomic DNA
tcgcccgccaggcctcgggg

SEQ ID NO: 158810 - DNA, 20 bp, Homo sapiens
  source 1..20: mol_type = genomic DNA
cgcccgccaggcctcggggc

SEQ ID NO: 158811 - DNA, 20 bp, Homo sapiens
  source 1..20: mol_type = genomic DNA
gcccgccaggcctcggggcc

SEQ ID NO: 158812 - DNA, 20 bp, Homo sapiens
  source 1..20: mol_type = genomic DNA
cccgccaggcctcggggccg

SEQ ID NO: 158813 - DNA, 20 bp, Homo sapiens
  source 1..20: mol_type = genomic DNA
ccgccaggcctcggggccgc

SEQ ID NO: 158814 - DNA, 20 bp, Homo sapiens
  source 1..20: mol_type = genomic DNA
cgccaggcctcggggccgcc

SEQ ID NO: 158815 - DNA, 20 bp, Homo sapiens
  source 1..20: mol_type = genomic DNA
gccaggcctcggggccgccc

SEQ ID NO: 158816 - DNA, 20 bp, Homo sapiens
  source 1..20: mol_type = genomic DNA
ccaggcctcggggccgccct

SEQ ID NO: 158817 - DNA, 20 bp, Homo sapiens
  source 1..20: mol_type = genomic DNA
caggcctcggggccgccctg

SEQ ID NO: 158818 - DNA, 20 bp, Homo sapiens
  source 1..20: mol_type = genomic DNA
aggcctcggggccgccctgg

SEQ ID NO: 158819 - DNA, 20 bp, Homo sapiens
  source 1..20: mol_type = genomic DNA
ggcctcggggccgccctggt

SEQ ID NO: 158820 - DNA, 20 bp, Homo sapiens
  source 1..20: mol_type = genomic DNA
gcctcggggccgccctggtc

SEQ ID NO: 158821 - DNA, 20 bp, Homo sapiens
  source 1..20: mol_type = genomic DNA
cctcggggccgccctggtcc

SEQ ID NO: 158822 - DNA, 20 bp, Homo sapiens
  source 1..20: mol_type = genomic DNA
ctcggggccgccctggtcca

SEQ ID NO: 158823 - DNA, 20 bp, Homo sapiens
  source 1..20: mol_type = genomic DNA
tcggggccgccctggtccag

SEQ ID NO: 158824 - DNA, 20 bp, Homo sapiens
  source 1..20: mol_type = genomic DNA
cggggccgccctggtccagc

SEQ ID NO: 158825 - DNA, 20 bp, Homo sapiens
  source 1..20: mol_type = genomic DNA
ggggccgccctggtccagcg

SEQ ID NO: 158826 - DNA, 20 bp, Homo sapiens
  source 1..20: mol_type = genomic DNA
gggccgccctggtccagcgc

SEQ ID NO: 158827 - DNA, 20 bp, Homo sapiens
  source 1..20: mol_type = genomic DNA
ggccgccctggtccagcgcc

SEQ ID NO: 158828 - DNA, 20 bp, Homo sapiens
  source 1..20: mol_type = genomic DNA
gccgccctggtccagcgccc

SEQ ID NO: 158829 - DNA, 20 bp, Homo sapiens
  source 1..20: mol_type = genomic DNA
ccgccctggtccagcgcccg

SEQ ID NO: 158830 - DNA, 20 bp, Homo sapiens
  source 1..20: mol_type = genomic DNA
cgccctggtccagcgcccgg

SEQ ID NO: 158831 - DNA, 20 bp, Homo sapiens
  source 1..20: mol_type = genomic DNA
gccctggtccagcgcccggt

SEQ ID NO: 158832 - DNA, 20 bp, Homo sapiens
  source 1..20: mol_type = genomic DNA
ccctggtccagcgcccggtc

SEQ ID NO: 158833 - DNA, 20 bp, Homo sapiens
  source 1..20: mol_type = genomic DNA
cctggtccagcgcccggtcc

SEQ ID NO: 158834 - DNA, 20 bp, Homo sapiens
  source 1..20: mol_type = genomic DNA
ctggtccagcgcccggtccc

SEQ ID NO: 158835 - DNA, 20 bp, Homo sapiens
  source 1..20: mol_type = genomic DNA
tggtccagcgcccggtcccg

SEQ ID NO: 158836 - DNA, 20 bp, Homo sapiens
  source 1..20: mol_type = genomic DNA
ggtccagcgcccggtcccgg

SEQ ID NO: 158837 - DNA, 20 bp, Homo sapiens
  source 1..20: mol_type = genomic DNA
gtccagcgcccggtcccggc

SEQ ID NO: 158838 - DNA, 20 bp, Homo sapiens
  source 1..20: mol_type = genomic DNA
tccagcgcccggtcccggcc

SEQ ID NO: 158839 - DNA, 20 bp, Homo sapiens
  source 1..20: mol_type = genomic DNA
ccagcgcccggtcccggccc

SEQ ID NO: 158840 - DNA, 20 bp, Homo sapiens
  source 1..20: mol_type = genomic DNA
cagcgcccggtcccggcccg

SEQ ID NO: 158841 - DNA, 20 bp, Homo sapiens
  source 1..20: mol_type = genomic DNA
agcgcccggtcccggcccgt

SEQ ID NO: 158842 - DNA, 20 bp, Homo sapiens
  source 1..20: mol_type = genomic DNA
gcgcccggtcccggcccgtg

SEQ ID NO: 158843 - DNA, 20 bp, Homo sapiens
  source 1..20: mol_type = genomic DNA
cgcccggtcccggcccgtgc

SEQ ID NO: 158844 - DNA, 20 bp, Homo sapiens
  source 1..20: mol_type = genomic DNA
gcccggtcccggcccgtgcc

SEQ ID NO: 158845 - DNA, 20 bp, Homo sapiens
  source 1..20: mol_type = genomic DNA
cccggtcccggcccgtgccg

SEQ ID NO: 158846 - DNA, 20 bp, Homo sapiens
  source 1..20: mol_type = genomic DNA
ccggtcccggcccgtgccgc

SEQ ID NO: 158847 - DNA, 20 bp, Homo sapiens
  source 1..20: mol_type = genomic DNA
cggtcccggcccgtgccgcc

SEQ ID NO: 158848 - DNA, 20 bp, Homo sapiens
  source 1..20: mol_type = genomic DNA
ggtcccggcccgtgccgccc

SEQ ID NO: 158849 - DNA, 20 bp, Homo sapiens
  source 1..20: mol_type = genomic DNA
gtcccggcccgtgccgcccg

SEQ ID NO: 158850 - DNA, 20 bp, Homo sapiens
  source 1..20: mol_type = genomic DNA
tcccggcccgtgccgcccgg

SEQ ID NO: 158851 - DNA, 20 bp, Homo sapiens
  source 1..20: mol_type = genomic DNA
cccggcccgtgccgcccggt

SEQ ID NO: 158852 - DNA, 20 bp, Homo sapiens
  source 1..20: mol_type = genomic DNA
ccggcccgtgccgcccggtc

SEQ ID NO: 158853 - DNA, 20 bp, Homo sapiens
  source 1..20: mol_type = genomic DNA
cggcccgtgccgcccggtcg

SEQ ID NO: 158854 - DNA, 20 bp, Homo sapiens
  source 1..20: mol_type = genomic DNA
ggcccgtgccgcccggtcgg

SEQ ID NO: 158855 - DNA, 20 bp, Homo sapiens
  source 1..20: mol_type = genomic DNA
gcccgtgccgcccggtcggt

SEQ ID NO: 158856 - DNA, 20 bp, Homo sapiens
  source 1..20: mol_type = genomic DNA
cccgtgccgcccggtcggtg

SEQ ID NO: 158857 - DNA, 20 bp, Homo sapiens
  source 1..20: mol_type = genomic DNA
ccgtgccgcccggtcggtgc

SEQ ID NO: 158858 - DNA, 20 bp, Homo sapiens
  source 1..20: mol_type = genomic DNA
cgtgccgcccggtcggtgcc

SEQ ID NO: 158859 - DNA, 20 bp, Homo sapiens
  source 1..20: mol_type = genomic DNA
gtgccgcccggtcggtgcct

SEQ ID NO: 158860 - DNA, 20 bp, Homo sapiens
  source 1..20: mol_type = genomic DNA
tgccgcccggtcggtgcctt

SEQ ID NO: 158861 - DNA, 20 bp, Homo sapiens
  source 1..20: mol_type = genomic DNA
gccgcccggtcggtgccttc

SEQ ID NO: 158862 - DNA, 20 bp, Homo sapiens
  source 1..20: mol_type = genomic DNA
ccgcccggtcggtgccttcg

SEQ ID NO: 158863 - DNA, 20 bp, Homo sapiens
  source 1..20: mol_type = genomic DNA
cgcccggtcggtgccttcgc

SEQ ID NO: 158864 - DNA, 20 bp, Homo sapiens
  source 1..20: mol_type = genomic DNA
gcccggtcggtgccttcgcc

SEQ ID NO: 158865 - DNA, 20 bp, Homo sapiens
  source 1..20: mol_type = genomic DNA
cccggtcggtgccttcgccc

SEQ ID NO: 158866 - DNA, 20 bp, Homo sapiens
  source 1..20: mol_type = genomic DNA
ccggtcggtgccttcgcccc

SEQ ID NO: 158867 - DNA, 20 bp, Homo sapiens
  source 1..20: mol_type = genomic DNA
cggtcggtgccttcgccccc

SEQ ID NO: 158868 - DNA, 20 bp, Homo sapiens
  source 1..20: mol_type = genomic DNA
ggtcggtgccttcgccccca

SEQ ID NO: 158869 - DNA, 20 bp, Homo sapiens
  source 1..20: mol_type = genomic DNA
gtcggtgccttcgcccccag

SEQ ID NO: 158870 - DNA, 20 bp, Homo sapiens
  source 1..20: mol_type = genomic DNA
tcggtgccttcgcccccagc

SEQ ID NO: 158871 - DNA, 20 bp, Homo sapiens
  source 1..20: mol_type = genomic DNA
cggtgccttcgcccccagcg

SEQ ID NO: 158872 - DNA, 20 bp, Homo sapiens
  source 1..20: mol_type = genomic DNA
ggtgccttcgcccccagcgg

SEQ ID NO: 158873 - DNA, 20 bp, Homo sapiens
  source 1..20: mol_type = genomic DNA
gtgccttcgcccccagcggt

SEQ ID NO: 158874 - DNA, 20 bp, Homo sapiens
  source 1..20: mol_type = genomic DNA
tgccttcgcccccagcggtg

SEQ ID NO: 158875 - DNA, 20 bp, Homo sapiens
  source 1..20: mol_type = genomic DNA
gccttcgcccccagcggtgc

SEQ ID NO: 158876 - DNA, 20 bp, Homo sapiens
  source 1..20: mol_type = genomic DNA
ccttcgcccccagcggtgcg

SEQ ID NO: 158877 - DNA, 20 bp, Homo sapiens
  source 1..20: mol_type = genomic DNA
cttcgcccccagcggtgcgg

SEQ ID NO: 158878 - DNA, 20 bp, Homo sapiens
  source 1..20: mol_type = genomic DNA
ttcgcccccagcggtgcggt

SEQ ID NO: 158879 - DNA, 20 bp, Homo sapiens
  source 1..20: mol_type = genomic DNA
tcgcccccagcggtgcggtg

SEQ ID NO: 158880 - DNA, 20 bp, Homo sapiens
  source 1..20: mol_type = genomic DNA
cgcccccagcggtgcggtgc

SEQ ID NO: 158881 - DNA, 20 bp, Homo sapiens
  source 1..20: mol_type = genomic DNA
gcccccagcggtgcggtgcc

SEQ ID NO: 158882 - DNA, 20 bp, Homo sapiens
  source 1..20: mol_type = genomic DNA
cccccagcggtgcggtgccc

SEQ ID NO: 158883 - DNA, 20 bp, Homo sapiens
  source 1..20: mol_type = genomic DNA
ccccagcggtgcggtgccca

SEQ ID NO: 158884 - DNA, 20 bp, Homo sapiens
  source 1..20: mol_type = genomic DNA
cccagcggtgcggtgcccaa

SEQ ID NO: 158885 - DNA, 20 bp, Homo sapiens
  source 1..20: mol_type = genomic DNA
ccagcggtgcggtgcccaag

SEQ ID NO: 158886 - DNA, 20 bp, Homo sapiens
  source 1..20: mol_type = genomic DNA
cagcggtgcggtgcccaagt

SEQ ID NO: 158887 - DNA, 20 bp, Homo sapiens
  source 1..20: mol_type = genomic DNA
agcggtgcggtgcccaagtg

SEQ ID NO: 158888 - DNA, 20 bp, Homo sapiens
  source 1..20: mol_type = genomic DNA
gcggtgcggtgcccaagtgc

SEQ ID NO: 158889 - DNA, 20 bp, Homo sapiens
  source 1..20: mol_type = genomic DNA
cggtgcggtgcccaagtgct

SEQ ID NO: 158890 - DNA, 20 bp, Homo sapiens
  source 1..20: mol_type = genomic DNA
ggtgcggtgcccaagtgctg

SEQ ID NO: 158891 - DNA, 20 bp, Homo sapiens
  source 1..20: mol_type = genomic DNA
gtgcggtgcccaagtgctga

SEQ ID NO: 158892 - DNA, 20 bp, Homo sapiens
  source 1..20: mol_type = genomic DNA
tgcggtgcccaagtgctgag

SEQ ID NO: 158893 - DNA, 20 bp, Homo sapiens
  source 1..20: mol_type = genomic DNA
gcggtgcccaagtgctgagt

SEQ ID NO: 158894 - DNA, 20 bp, Homo sapiens
  source 1..20: mol_type = genomic DNA
cggtgcccaagtgctgagtc

SEQ ID NO: 158895 - DNA, 20 bp, Homo sapiens
  source 1..20: mol_type = genomic DNA
ggtgcccaagtgctgagtca

SEQ ID NO: 158896 - DNA, 20 bp, Homo sapiens
  source 1..20: mol_type = genomic DNA
gtgcccaagtgctgagtcac

SEQ ID NO: 158897 - DNA, 20 bp, Homo sapiens
  source 1..20: mol_type = genomic DNA
tgcccaagtgctgagtcacc

SEQ ID NO: 158898 - DNA, 20 bp, Homo sapiens
  source 1..20: mol_type = genomic DNA
gcccaagtgctgagtcaccg

SEQ ID NO: 158899 - DNA, 20 bp, Homo sapiens
  source 1..20: mol_type = genomic DNA
cccaagtgctgagtcaccgg

SEQ ID NO: 158900 - DNA, 20 bp, Homo sapiens
  source 1..20: mol_type = genomic DNA
ccaagtgctgagtcaccggg

SEQ ID NO: 158901 - DNA, 20 bp, Homo sapiens
  source 1..20: mol_type = genomic DNA
caagtgctgagtcaccgggc

SEQ ID NO: 158902 - DNA, 20 bp, Homo sapiens
  source 1..20: mol_type = genomic DNA
aagtgctgagtcaccgggcg

SEQ ID NO: 158903 - DNA, 20 bp, Homo sapiens
  source 1..20: mol_type = genomic DNA
agtgctgagtcaccgggcgg

SEQ ID NO: 158904 - DNA, 20 bp, Homo sapiens
  source 1..20: mol_type = genomic DNA
gtgctgagtcaccgggcggg

SEQ ID NO: 158905 - DNA, 20 bp, Homo sapiens
  source 1..20: mol_type = genomic DNA
tgctgagtcaccgggcgggc

SEQ ID NO: 158906 - DNA, 20 bp, Homo sapiens
  source 1..20: mol_type = genomic DNA
gctgagtcaccgggcgggcc

SEQ ID NO: 158907 - DNA, 20 bp, Homo sapiens
  source 1..20: mol_type = genomic DNA
ctgagtcaccgggcgggccc

SEQ ID NO: 158908 - DNA, 20 bp, Homo sapiens
  source 1..20: mol_type = genomic DNA
tgagtcaccgggcgggcccg

SEQ ID NO: 158909 - DNA, 20 bp, Homo sapiens
  source 1..20: mol_type = genomic DNA
gagtcaccgggcgggcccgg

SEQ ID NO: 158910 - DNA, 20 bp, Homo sapiens
  source 1..20: mol_type = genomic DNA
agtcaccgggcgggcccggg

SEQ ID NO: 158911 - DNA, 20 bp, Homo sapiens
  source 1..20: mol_type = genomic DNA
gtcaccgggcgggcccgggc

SEQ ID NO: 158912 - DNA, 20 bp, Homo sapiens
  source 1..20: mol_type = genomic DNA
tcaccgggcgggcccgggcg

SEQ ID NO: 158913 - DNA, 20 bp, Homo sapiens
  source 1..20: mol_type = genomic DNA
caccgggcgggcccgggcgc

SEQ ID NO: 158914 - DNA, 20 bp, Homo sapiens
  source 1..20: mol_type = genomic DNA
accgggcgggcccgggcgcg

SEQ ID NO: 158915 - DNA, 20 bp, Homo sapiens
  source 1..20: mol_type = genomic DNA
ccgggcgggcccgggcgcgg

SEQ ID NO: 158916 - DNA, 20 bp, Homo sapiens
  source 1..20: mol_type = genomic DNA
cgggcgggcccgggcgcggg

SEQ ID NO: 158917 - DNA, 20 bp, Homo sapiens
  source 1..20: mol_type = genomic DNA
gggcgggcccgggcgcgggg

SEQ ID NO: 158918 - DNA, 20 bp, Homo sapiens
  source 1..20: mol_type = genomic DNA
ggcgggcccgggcgcggggc

SEQ ID NO: 158919 - DNA, 20 bp, Homo sapiens
  source 1..20: mol_type = genomic DNA
gcgggcccgggcgcggggcg

SEQ ID NO: 158920 - DNA, 20 bp, Homo sapiens
  source 1..20: mol_type = genomic DNA
cgggcccgggcgcggggcgt

SEQ ID NO: 158921 - DNA, 20 bp, Homo sapiens
  source 1..20: mol_type = genomic DNA
gggcccgggcgcggggcgtg

SEQ ID NO: 158922 - DNA, 20 bp, Homo sapiens
  source 1..20: mol_type = genomic DNA
ggcccgggcgcggggcgtgg

SEQ ID NO: 158923 - DNA, 20 bp, Homo sapiens
  source 1..20: mol_type = genomic DNA
gcccgggcgcggggcgtggg

SEQ ID NO: 158924 - DNA, 20 bp, Homo sapiens
  source 1..20: mol_type = genomic DNA
cccgggcgcggggcgtggga

SEQ ID NO: 158925 - DNA, 20 bp, Homo sapiens
  source 1..20: mol_type = genomic DNA
ccgggcgcggggcgtgggac

SEQ ID NO: 158926 - DNA, 20 bp, Homo sapiens
  source 1..20: mol_type = genomic DNA
cgggcgcggggcgtgggacc

SEQ ID NO: 158927 - DNA, 20 bp, Homo sapiens
  source 1..20: mol_type = genomic DNA
gggcgcggggcgtgggaccg

SEQ ID NO: 158928 - DNA, 20 bp, Homo sapiens
  source 1..20: mol_type = genomic DNA
ggcgcggggcgtgggaccga

SEQ ID NO: 158929 - DNA, 20 bp, Homo sapiens
  source 1..20: mol_type = genomic DNA
gcgcggggcgtgggaccgag

SEQ ID NO: 158930 - DNA, 20 bp, Homo sapiens
  source 1..20: mol_type = genomic DNA
cgcggggcgtgggaccgagg

SEQ ID NO: 158931 - DNA, 20 bp, Homo sapiens
  source 1..20: mol_type = genomic DNA
gcggggcgtgggaccgaggc

SEQ ID NO: 158932 - DNA, 20 bp, Homo sapiens
  source 1..20: mol_type = genomic DNA
cggggcgtgggaccgaggcc

SEQ ID NO: 158933 - DNA, 20 bp, Homo sapiens
  source 1..20: mol_type = genomic DNA
ggggcgtgggaccgaggccg

SEQ ID NO: 158934 - DNA, 20 bp, Homo sapiens
  source 1..20: mol_type = genomic DNA
gggcgtgggaccgaggccgc

SEQ ID NO: 158935 - DNA, 20 bp, Homo sapiens
  source 1..20: mol_type = genomic DNA
ggcgtgggaccgaggccgcc

SEQ ID NO: 158936 - DNA, 20 bp, Homo sapiens
  source 1..20: mol_type = genomic DNA
gcgtgggaccgaggccgccg

SEQ ID NO: 158937 - DNA, 20 bp, Homo sapiens
  source 1..20: mol_type = genomic DNA
cgtgggaccgaggccgccgc

SEQ ID NO: 158938 - DNA, 20 bp, Homo sapiens
  source 1..20: mol_type = genomic DNA
gtgggaccgaggccgccgcg

SEQ ID NO: 158939 - DNA, 20 bp, Homo sapiens
  source 1..20: mol_type = genomic DNA
tgggaccgaggccgccgcgg

SEQ ID NO: 158940 - DNA, 20 bp, Homo sapiens
  source 1..20: mol_type = genomic DNA
gggaccgaggccgccgcggg

SEQ ID NO: 158941 - DNA, 20 bp, Homo sapiens
  source 1..20: mol_type = genomic DNA
ggaccgaggccgccgcgggg

SEQ ID NO: 158942 - DNA, 20 bp, Homo sapiens
  source 1..20: mol_type = genomic DNA
gaccgaggccgccgcggggc

SEQ ID NO: 158943 - DNA, 20 bp, Homo sapiens
  source 1..20: mol_type = genomic DNA
accgaggccgccgcggggct

SEQ ID NO: 158944 - DNA, 20 bp, Homo sapiens
  source 1..20: mol_type = genomic DNA
ccgaggccgccgcggggctg

SEQ ID NO: 158945 - DNA, 20 bp, Homo sapiens
  source 1..20: mol_type = genomic DNA
cgaggccgccgcggggctgg

SEQ ID NO: 158946 - DNA, 20 bp, Homo sapiens
  source 1..20: mol_type = genomic DNA
gaggccgccgcggggctggg

SEQ ID NO: 158947 - DNA, 20 bp, Homo sapiens
  source 1..20: mol_type = genomic DNA
aggccgccgcggggctgggc

SEQ ID NO: 158948 - DNA, 20 bp, Homo sapiens
  source 1..20: mol_type = genomic DNA
ggccgccgcggggctgggcc

SEQ ID NO: 158949 - DNA, 20 bp, Homo sapiens
  source 1..20: mol_type = genomic DNA
gccgccgcggggctgggcct

SEQ ID NO: 158950 - DNA, 20 bp, Homo sapiens
  source 1..20: mol_type = genomic DNA
ccgccgcggggctgggcctg

SEQ ID NO: 158951 - DNA, 20 bp, Homo sapiens
  source 1..20: mol_type = genomic DNA
cgccgcggggctgggcctgc

SEQ ID NO: 158952 - DNA, 20 bp, Homo sapiens
  source 1..20: mol_type = genomic DNA
gccgcggggctgggcctgcg

SEQ ID NO: 158953 - DNA, 20 bp, Homo sapiens
  source 1..20: mol_type = genomic DNA
ccgcggggctgggcctgcgc

SEQ ID NO: 158954 - DNA, 20 bp, Homo sapiens
  source 1..20: mol_type = genomic DNA
cgcggggctgggcctgcgcg

SEQ ID NO: 158955 - DNA, 20 bp, Homo sapiens
  source 1..20: mol_type = genomic DNA
gcggggctgggcctgcgcgt

SEQ ID NO: 158956 - DNA, 20 bp, Homo sapiens
  source 1..20: mol_type = genomic DNA
cggggctgggcctgcgcgtg

SEQ ID NO: 158957 - DNA, 20 bp, Homo sapiens
  source 1..20: mol_type = genomic DNA
ggggctgggcctgcgcgtgg

SEQ ID NO: 158958 - DNA, 20 bp, Homo sapiens
  source 1..20: mol_type = genomic DNA
gggctgggcctgcgcgtggc

SEQ ID NO: 158959 - DNA, 20 bp, Homo sapiens
  source 1..20: mol_type = genomic DNA
ggctgggcctgcgcgtggcg

SEQ ID NO: 158960 - DNA, 20 bp, Homo sapiens
  source 1..20: mol_type = genomic DNA
gctgggcctgcgcgtggcgg

SEQ ID NO: 158961 - DNA, 20 bp, Homo sapiens
  source 1..20: mol_type = genomic DNA
ctgggcctgcgcgtggcggg

SEQ ID NO: 158962 - DNA, 20 bp, Homo sapiens
  source 1..20: mol_type = genomic DNA
tgggcctgcgcgtggcggga

SEQ ID NO: 158963 - DNA, 20 bp, Homo sapiens
  source 1..20: mol_type = genomic DNA
gggcctgcgcgtggcgggag

SEQ ID NO: 158964 - DNA, 20 bp, Homo sapiens
  source 1..20: mol_type = genomic DNA
ggcctgcgcgtggcgggagc

SEQ ID NO: 158965 - DNA, 20 bp, Homo sapiens
  source 1..20: mol_type = genomic DNA
gcctgcgcgtggcgggagcg

SEQ ID NO: 158966 - DNA, 20 bp, Homo sapiens
  source 1..20: mol_type = genomic DNA
cctgcgcgtggcgggagcgc

SEQ ID NO: 158967 - DNA, 20 bp, Homo sapiens
  source 1..20: mol_type = genomic DNA
ctgcgcgtggcgggagcgcg

SEQ ID NO: 158968 - DNA, 20 bp, Homo sapiens
  source 1..20: mol_type = genomic DNA
tgcgcgtggcgggagcgcgg

SEQ ID NO: 158969 - DNA, 20 bp, Homo sapiens
  source 1..20: mol_type = genomic DNA
gcgcgtggcgggagcgcggg

SEQ ID NO: 158970 - DNA, 20 bp, Homo sapiens
  source 1..20: mol_type = genomic DNA
cgcgtggcgggagcgcgggg

SEQ ID NO: 158971 - DNA, 20 bp, Homo sapiens
  source 1..20: mol_type = genomic DNA
gcgtggcgggagcgcgggga

SEQ ID NO: 158972 - DNA, 20 bp, Homo sapiens
  source 1..20: mol_type = genomic DNA
cgtggcgggagcgcggggag

SEQ ID NO: 158973 - DNA, 20 bp, Homo sapiens
  source 1..20: mol_type = genomic DNA
gtggcgggagcgcggggagg

SEQ ID NO: 158974 - DNA, 20 bp, Homo sapiens
  source 1..20: mol_type = genomic DNA
tggcgggagcgcggggaggg

SEQ ID NO: 158975 - DNA, 20 bp, Homo sapiens
  source 1..20: mol_type = genomic DNA
ggcgggagcgcggggaggga

SEQ ID NO: 158976 - DNA, 20 bp, Homo sapiens
  source 1..20: mol_type = genomic DNA
gcgggagcgcggggagggat

SEQ ID NO: 158977 - DNA, 20 bp, Homo sapiens
  source 1..20: mol_type = genomic DNA
cgggagcgcggggagggatt

SEQ ID NO: 158978 - DNA, 20 bp, Homo sapiens
  source 1..20: mol_type = genomic DNA
gggagcgcggggagggattg

SEQ ID NO: 158979 - DNA, 20 bp, Homo sapiens
  source 1..20: mol_type = genomic DNA
ggagcgcggggagggattgc

SEQ ID NO: 158980 - DNA, 20 bp, Homo sapiens
  source 1..20: mol_type = genomic DNA
gagcgcggggagggattgcc

SEQ ID NO: 158981 - DNA, 20 bp, Homo sapiens
  source 1..20: mol_type = genomic DNA
agcgcggggagggattgccg

SEQ ID NO: 158982 - DNA, 20 bp, Homo sapiens
  source 1..20: mol_type = genomic DNA
gcgcggggagggattgccgc

SEQ ID NO: 158983 - DNA, 20 bp, Homo sapiens
  source 1..20: mol_type = genomic DNA
cgcggggagggattgccgcg

SEQ ID NO: 158984 - DNA, 20 bp, Homo sapiens
  source 1..20: mol_type = genomic DNA
gcggggagggattgccgcgg

SEQ ID NO: 158985 - DNA, 20 bp, Homo sapiens
  source 1..20: mol_type = genomic DNA
cggggagggattgccgcggg

SEQ ID NO: 158986 - DNA, 20 bp, Homo sapiens
  source 1..20: mol_type = genomic DNA
ggggagggattgccgcgggc

SEQ ID NO: 158987 - DNA, 20 bp, Homo sapiens
  source 1..20: mol_type = genomic DNA
gggagggattgccgcgggcc

SEQ ID NO: 158988 - DNA, 20 bp, Homo sapiens
  source 1..20: mol_type = genomic DNA
ggagggattgccgcgggccg

SEQ ID NO: 158989 - DNA, 20 bp, Homo sapiens
  source 1..20: mol_type = genomic DNA
gagggattgccgcgggccgg

SEQ ID NO: 158990 - DNA, 20 bp, Homo sapiens
  source 1..20: mol_type = genomic DNA
agggattgccgcgggccggg

SEQ ID NO: 158991 - DNA, 20 bp, Homo sapiens
  source 1..20: mol_type = genomic DNA
gggattgccgcgggccgggg

SEQ ID NO: 158992 - DNA, 20 bp, Homo sapiens
  source 1..20: mol_type = genomic DNA
ggattgccgcgggccgggga

SEQ ID NO: 158993 - DNA, 20 bp, Homo sapiens
  source 1..20: mol_type = genomic DNA
gattgccgcgggccggggag

SEQ ID NO: 158994 - DNA, 20 bp, Homo sapiens
  source 1..20: mol_type = genomic DNA
attgccgcgggccggggagg

SEQ ID NO: 158995 - DNA, 20 bp, Homo sapiens
  source 1..20: mol_type = genomic DNA
ttgccgcgggccggggaggg

SEQ ID NO: 158996 - DNA, 20 bp, Homo sapiens
  source 1..20: mol_type = genomic DNA
tgccgcgggccggggagggg

SEQ ID NO: 158997 - DNA, 20 bp, Homo sapiens
  source 1..20: mol_type = genomic DNA
gccgcgggccggggaggggc

SEQ ID NO: 158998 - DNA, 20 bp, Homo sapiens
  source 1..20: mol_type = genomic DNA
ccgcgggccggggaggggcg

SEQ ID NO: 158999 - DNA, 20 bp, Homo sapiens
  source 1..20: mol_type = genomic DNA
cgcgggccggggaggggcgg

SEQ ID NO: 159000 - DNA, 20 bp, Homo sapiens
  source 1..20: mol_type = genomic DNA
gcgggccggggaggggcggg

SEQ ID NO: 159001 - DNA, 20 bp, Homo sapiens
  source 1..20: mol_type = genomic DNA
cgggccggggaggggcgggg

SEQ ID NO: 159002 - DNA, 20 bp, Homo sapiens
  source 1..20: mol_type = genomic DNA
gggccggggaggggcggggg

SEQ ID NO: 159003 - DNA, 20 bp, Homo sapiens
  source 1..20: mol_type = genomic DNA
ggccggggaggggcgggggc

SEQ ID NO: 159004 - DNA, 20 bp, Homo sapiens
  source 1..20: mol_type = genomic DNA
gccggggaggggcgggggcg

SEQ ID NO: 159005 - DNA, 20 bp, Homo sapiens
  source 1..20: mol_type = genomic DNA
ccggggaggggcgggggcgg

SEQ ID NO: 159006 - DNA, 20 bp, Homo sapiens
  source 1..20: mol_type = genomic DNA
cggggaggggcgggggcggg

SEQ ID NO: 159007 - DNA, 20 bp, Homo sapiens
  source 1..20: mol_type = genomic DNA
ggggaggggcgggggcgggc

SEQ ID NO: 159008 - DNA, 20 bp, Homo sapiens
  source 1..20: mol_type = genomic DNA
gggaggggcgggggcgggcg

SEQ ID NO: 159009 - DNA, 20 bp, Homo sapiens
  source 1..20: mol_type = genomic DNA
ggaggggcgggggcgggcgt

SEQ ID NO: 159010 - DNA, 20 bp, Homo sapiens
  source 1..20: mol_type = genomic DNA
gaggggcgggggcgggcgtg

SEQ ID NO: 159011 - DNA, 20 bp, Homo sapiens
  source 1..20: mol_type = genomic DNA
aggggcgggggcgggcgtgc

SEQ ID NO: 159012 - DNA, 20 bp, Homo sapiens
  source 1..20: mol_type = genomic DNA
ggggcgggggcgggcgtgct

SEQ ID NO: 159013 - DNA, 20 bp, Homo sapiens
  source 1..20: mol_type = genomic DNA
gggcgggggcgggcgtgctg

SEQ ID NO: 159014 - DNA, 20 bp, Homo sapiens
  source 1..20: mol_type = genomic DNA
ggcgggggcgggcgtgctgc

SEQ ID NO: 159015 - DNA, 20 bp, Homo sapiens
  source 1..20: mol_type = genomic DNA
gcgggggcgggcgtgctgcc

SEQ ID NO: 159016 - DNA, 20 bp, Homo sapiens
  source 1..20: mol_type = genomic DNA
cgggggcgggcgtgctgccc

SEQ ID NO: 159017 - DNA, 20 bp, Homo sapiens
  source 1..20: mol_type = genomic DNA
gggggcgggcgtgctgccct

SEQ ID NO: 159018 - DNA, 20 bp, Homo sapiens
  source 1..20: mol_type = genomic DNA
ggggcgggcgtgctgccctc

SEQ ID NO: 159019 - DNA, 20 bp, Homo sapiens
  source 1..20: mol_type = genomic DNA
gggcgggcgtgctgccctct

SEQ ID NO: 159020 - DNA, 20 bp, Homo sapiens
  source 1..20: mol_type = genomic DNA
ggcgggcgtgctgccctctg

SEQ ID NO: 159021 - DNA, 20 bp, Homo sapiens
  source 1..20: mol_type = genomic DNA
gcgggcgtgctgccctctgt

SEQ ID NO: 159022 - DNA, 20 bp, Homo sapiens
  source 1..20: mol_type = genomic DNA
cgggcgtgctgccctctgtg

SEQ ID NO: 159023 - DNA, 20 bp, Homo sapiens
  source 1..20: mol_type = genomic DNA
gggcgtgctgccctctgtgg

SEQ ID NO: 159024 - DNA, 20 bp, Homo sapiens
  source 1..20: mol_type = genomic DNA
ggcgtgctgccctctgtggt

SEQ ID NO: 159025 - DNA, 20 bp, Homo sapiens
  source 1..20: mol_type = genomic DNA
gcgtgctgccctctgtggtc

SEQ ID NO: 159026 - DNA, 20 bp, Homo sapiens
  source 1..20: mol_type = genomic DNA
cgtgctgccctctgtggtcc

SEQ ID NO: 159027 - DNA, 20 bp, Homo sapiens
  source 1..20: mol_type = genomic DNA
gtgctgccctctgtggtcct

SEQ ID NO: 159028 - DNA, 20 bp, Homo sapiens
  source 1..20: mol_type = genomic DNA
tgctgccctctgtggtcctt

SEQ ID NO: 159029 - DNA, 20 bp, Homo sapiens
  source 1..20: mol_type = genomic DNA
gctgccctctgtggtccttg

SEQ ID NO: 159030 - DNA, 20 bp, Homo sapiens
  source 1..20: mol_type = genomic DNA
ctgccctctgtggtccttgg

SEQ ID NO: 159031 - DNA, 20 bp, Homo sapiens
  source 1..20: mol_type = genomic DNA
tgccctctgtggtccttggg

SEQ ID NO: 159032 - DNA, 20 bp, Homo sapiens
  source 1..20: mol_type = genomic DNA
gccctctgtggtccttgggc

SEQ ID NO: 159033 - DNA, 20 bp, Homo sapiens
  source 1..20: mol_type = genomic DNA
ccctctgtggtccttgggcc

SEQ ID NO: 159034 - DNA, 20 bp, Homo sapiens
  source 1..20: mol_type = genomic DNA
cctctgtggtccttgggccg

SEQ ID NO: 159035 - DNA, 20 bp, Homo sapiens
  source 1..20: mol_type = genomic DNA
ctctgtggtccttgggccgc

SEQ ID NO: 159036 - DNA, 20 bp, Homo sapiens
  source 1..20: mol_type = genomic DNA
tctgtggtccttgggccgcc

SEQ ID NO: 159037 - DNA, 20 bp, Homo sapiens
  source 1..20: mol_type = genomic DNA
ctgtggtccttgggccgccg

SEQ ID NO: 159038 - DNA, 20 bp, Homo sapiens
  source 1..20: mol_type = genomic DNA
tgtggtccttgggccgccgc

SEQ ID NO: 159039 - DNA, 20 bp, Homo sapiens
  source 1..20: mol_type = genomic DNA
gtggtccttgggccgccgcc

SEQ ID NO: 159040 - DNA, 20 bp, Homo sapiens
  source 1..20: mol_type = genomic DNA
tggtccttgggccgccgccg

SEQ ID NO: 159041 - DNA, 20 bp, Homo sapiens
  source 1..20: mol_type = genomic DNA
ggtccttgggccgccgccgc

SEQ ID NO: 159042 - DNA, 20 bp, Homo sapiens
  source 1..20: mol_type = genomic DNA
gtccttgggccgccgccgcg

SEQ ID NO: 159043 - DNA, 20 bp, Homo sapiens
  source 1..20: mol_type = genomic DNA
tccttgggccgccgccgcgg

SEQ ID NO: 159044 - DNA, 20 bp, Homo sapiens
  source 1..20: mol_type = genomic DNA
ccttgggccgccgccgcggg

SEQ ID NO: 159045 - DNA, 20 bp, Homo sapiens
  source 1..20: mol_type = genomic DNA
cttgggccgccgccgcgggt

SEQ ID NO: 159046 - DNA, 20 bp, Homo sapiens
  source 1..20: mol_type = genomic DNA
ttgggccgccgccgcgggtc

SEQ ID NO: 159047 - DNA, 20 bp, Homo sapiens
  source 1..20: mol_type = genomic DNA
tgggccgccgccgcgggtct

SEQ ID NO: 159048 - DNA, 20 bp, Homo sapiens
  source 1..20: mol_type = genomic DNA
gggccgccgccgcgggtctg

SEQ ID NO: 159049 - DNA, 20 bp, Homo sapiens
  source 1..20: mol_type = genomic DNA
ggccgccgccgcgggtctgt

SEQ ID NO: 159050 - DNA, 20 bp, Homo sapiens
  source 1..20: mol_type = genomic DNA
gccgccgccgcgggtctgtc

SEQ ID NO: 159051 - DNA, 20 bp, Homo sapiens
  source 1..20: mol_type = genomic DNA
ccgccgccgcgggtctgtcg

SEQ ID NO: 159052 - DNA, 20 bp, Homo sapiens
  source 1..20: mol_type = genomic DNA
cgccgccgcgggtctgtcgt

SEQ ID NO: 159053 - DNA, 20 bp, Homo sapiens
  source 1..20: mol_type = genomic DNA
gccgccgcgggtctgtcgtg

SEQ ID NO: 159054 - DNA, 20 bp, Homo sapiens
  source 1..20: mol_type = genomic DNA
ccgccgcgggtctgtcgtgg

SEQ ID NO: 159055 - DNA, 20 bp, Homo sapiens
  source 1..20: mol_type = genomic DNA
cgccgcgggtctgtcgtggt

SEQ ID NO: 159056 - DNA, 20 bp, Homo sapiens
  source 1..20: mol_type = genomic DNA
gccgcgggtctgtcgtggtg

SEQ ID NO: 159057 - DNA, 20 bp, Homo sapiens
  source 1..20: mol_type = genomic DNA
ccgcgggtctgtcgtggtgc

SEQ ID NO: 159058 - DNA, 20 bp, Homo sapiens
  source 1..20: mol_type = genomic DNA
cgcgggtctgtcgtggtgcc

SEQ ID NO: 159059 - DNA, 20 bp, Homo sapiens
  source 1..20: mol_type = genomic DNA
gcgggtctgtcgtggtgcct

SEQ ID NO: 159060 - DNA, 20 bp, Homo sapiens
  source 1..20: mol_type = genomic DNA
cgggtctgtcgtggtgcctg

SEQ ID NO: 159061 - DNA, 20 bp, Homo sapiens
  source 1..20: mol_type = genomic DNA
gggtctgtcgtggtgcctgg

SEQ ID NO: 159062 - DNA, 20 bp, Homo sapiens
  source 1..20: mol_type = genomic DNA
ggtctgtcgtggtgcctgga

SEQ ID NO: 159063 - DNA, 20 bp, Homo sapiens
  source 1..20: mol_type = genomic DNA
gtctgtcgtggtgcctggag

SEQ ID NO: 159064 - DNA, 20 bp, Homo sapiens
  source 1..20: mol_type = genomic DNA
tctgtcgtggtgcctggagc

SEQ ID NO: 159065 - DNA, 20 bp, Homo sapiens
  source 1..20: mol_type = genomic DNA
ctgtcgtggtgcctggagcg

SEQ ID NO: 159066 - DNA, 20 bp, Homo sapiens
  source 1..20: mol_type = genomic DNA
tgtcgtggtgcctggagcgg

SEQ ID NO: 159067 - DNA, 20 bp, Homo sapiens
  source 1..20: mol_type = genomic DNA
gtcgtggtgcctggagcggc

SEQ ID NO: 159068 - DNA, 20 bp, Homo sapiens
  source 1..20: mol_type = genomic DNA
tcgtggtgcctggagcggct

SEQ ID NO: 159069 - DNA, 20 bp, Homo sapiens
  source 1..20: mol_type = genomic DNA
cgtggtgcctggagcggctg

SEQ ID NO: 159070 - DNA, 20 bp, Homo sapiens
  source 1..20: mol_type = genomic DNA
gtggtgcctggagcggctgt

SEQ ID NO: 159071 - DNA, 20 bp, Homo sapiens
  source 1..20: mol_type = genomic DNA
tggtgcctggagcggctgtg

SEQ ID NO: 159072 - DNA, 20 bp, Homo sapiens
  source 1..20: mol_type = genomic DNA
ggtgcctggagcggctgtgc

SEQ ID NO: 159073 - DNA, 20 bp, Homo sapiens
  source 1..20: mol_type = genomic DNA
gtgcctggagcggctgtgct

SEQ ID NO: 159074 - DNA, 20 bp, Homo sapiens
  source 1..20: mol_type = genomic DNA
tgcctggagcggctgtgctc

SEQ ID NO: 159075 - DNA, 20 bp, Homo sapiens
  source 1..20: mol_type = genomic DNA
gcctggagcggctgtgctcg

SEQ ID NO: 159076 - DNA, 20 bp, Homo sapiens
  source 1..20: mol_type = genomic DNA
cctggagcggctgtgctcgt

SEQ ID NO: 159077 - DNA, 20 bp, Homo sapiens
  source 1..20: mol_type = genomic DNA
ctggagcggctgtgctcgtc

SEQ ID NO: 159078 - DNA, 20 bp, Homo sapiens
  source 1..20: mol_type = genomic DNA
tggagcggctgtgctcgtcc

SEQ ID NO: 159079 - DNA, 20 bp, Homo sapiens
  source 1..20: mol_type = genomic DNA
ggagcggctgtgctcgtccc

SEQ ID NO: 159080 - DNA, 20 bp, Homo sapiens
  source 1..20: mol_type = genomic DNA
gagcggctgtgctcgtccct

SEQ ID NO: 159081 - DNA, 20 bp, Homo sapiens
  source 1..20: mol_type = genomic DNA
agcggctgtgctcgtccctt

SEQ ID NO: 159082 - DNA, 20 bp, Homo sapiens
  source 1..20: mol_type = genomic DNA
gcggctgtgctcgtcccttg

SEQ ID NO: 159083 - DNA, 20 bp, Homo sapiens
  source 1..20: mol_type = genomic DNA
cggctgtgctcgtcccttgc

SEQ ID NO: 159084 - DNA, 20 bp, Homo sapiens
  source 1..20: mol_type = genomic DNA
ggctgtgctcgtcccttgct

SEQ ID NO: 159085 - DNA, 20 bp, Homo sapiens
  source 1..20: mol_type = genomic DNA
gctgtgctcgtcccttgctt

SEQ ID NO: 159086 - DNA, 20 bp, Homo sapiens
  source 1..20: mol_type = genomic DNA
ctgtgctcgtcccttgcttg

SEQ ID NO: 159087 - DNA, 20 bp, Homo sapiens
  source 1..20: mol_type = genomic DNA
tgtgctcgtcccttgcttgg

SEQ ID NO: 159088 - DNA, 20 bp, Homo sapiens
  source 1..20: mol_type = genomic DNA
gtgctcgtcccttgcttggc

SEQ ID NO: 159089 - DNA, 20 bp, Homo sapiens
  source 1..20: mol_type = genomic DNA
tgctcgtcccttgcttggcc

SEQ ID NO: 159090 - DNA, 20 bp, Homo sapiens
  source 1..20: mol_type = genomic DNA
gctcgtcccttgcttggccg

SEQ ID NO: 159091 - DNA, 20 bp, Homo sapiens
  source 1..20: mol_type = genomic DNA
ctcgtcccttgcttggccgt

SEQ ID NO: 159092 - DNA, 20 bp, Homo sapiens
  source 1..20: mol_type = genomic DNA
tcgtcccttgcttggccgtg

SEQ ID NO: 159093 - DNA, 20 bp, Homo sapiens
  source 1..20: mol_type = genomic DNA
cgtcccttgcttggccgtgt

SEQ ID NO: 159094 - DNA, 20 bp, Homo sapiens
  source 1..20: mol_type = genomic DNA
gtcccttgcttggccgtgtt

SEQ ID NO: 159095 - DNA, 20 bp, Homo sapiens
  source 1..20: mol_type = genomic DNA
tcccttgcttggccgtgttc

SEQ ID NO: 159096 - DNA, 20 bp, Homo sapiens
  source 1..20: mol_type = genomic DNA
cccttgcttggccgtgttct

SEQ ID NO: 159097 - DNA, 20 bp, Homo sapiens
  source 1..20: mol_type = genomic DNA
ccttgcttggccgtgttctc

SEQ ID NO: 159098 - DNA, 20 bp, Homo sapiens
  source 1..20: mol_type = genomic DNA
cttgcttggccgtgttctcg

SEQ ID NO: 159099 - DNA, 20 bp, Homo sapiens
  source 1..20: mol_type = genomic DNA
ttgcttggccgtgttctcgt

SEQ ID NO: 159100 - DNA, 20 bp, Homo sapiens
  source 1..20: mol_type = genomic DNA
tgcttggccgtgttctcgtt

SEQ ID NO: 159101 - DNA, 20 bp, Homo sapiens
  source 1..20: mol_type = genomic DNA
gcttggccgtgttctcgttc

SEQ ID NO: 159102 - DNA, 20 bp, Homo sapiens
  source 1..20: mol_type = genomic DNA
cttggccgtgttctcgttcc

SEQ ID NO: 159103 - DNA, 20 bp, Homo sapiens
  source 1..20: mol_type = genomic DNA
ttggccgtgttctcgttcct

SEQ ID NO: 159104 - DNA, 20 bp, Homo sapiens
  source 1..20: mol_type = genomic DNA
tggccgtgttctcgttcctg

SEQ ID NO: 159105 - DNA, 20 bp, Homo sapiens
  source 1..20: mol_type = genomic DNA
ggccgtgttctcgttcctga

SEQ ID NO: 159106 - DNA, 20 bp, Homo sapiens
  source 1..20: mol_type = genomic DNA
gccgtgttctcgttcctgag

SEQ ID NO: 159107 - DNA, 20 bp, Homo sapiens
  source 1..20: mol_type = genomic DNA
ccgtgttctcgttcctgagg

SEQ ID NO: 159108 - DNA, 20 bp, Homo sapiens
  source 1..20: mol_type = genomic DNA
cgtgttctcgttcctgaggg

SEQ ID NO: 159109 - DNA, 20 bp, Homo sapiens
  source 1..20: mol_type = genomic DNA
gtgttctcgttcctgagggt

SEQ ID NO: 159110 - DNA, 20 bp, Homo sapiens
  source 1..20: mol_type = genomic DNA
tgttctcgttcctgagggtc

SEQ ID NO: 159111 - DNA, 20 bp, Homo sapiens
  source 1..20: mol_type = genomic DNA
gttctcgttcctgagggtcc

SEQ ID NO: 159112 - DNA, 20 bp, Homo sapiens
  source 1..20: mol_type = genomic DNA
ttctcgttcctgagggtccc

SEQ ID NO: 159113 - DNA, 20 bp, Homo sapiens
  source 1..20: mol_type = genomic DNA
tctcgttcctgagggtcccg

SEQ ID NO: 159114 - DNA, 20 bp, Homo sapiens
  source 1..20: mol_type = genomic DNA
ctcgttcctgagggtcccgc

SEQ ID NO: 159115 - DNA, 20 bp, Homo sapiens
  source 1..20: mol_type = genomic DNA
tcgttcctgagggtcccgcg

SEQ ID NO: 159116 - DNA, 20 bp, Homo sapiens
  source 1..20: mol_type = genomic DNA
cgttcctgagggtcccgcgg

SEQ ID NO: 159117 - DNA, 20 bp, Homo sapiens
  source 1..20: mol_type = genomic DNA
gttcctgagggtcccgcgga

SEQ ID NO: 159118 - DNA, 20 bp, Homo sapiens
  source 1..20: mol_type = genomic DNA
ttcctgagggtcccgcggac

SEQ ID NO: 159119 - DNA, 20 bp, Homo sapiens
  source 1..20: mol_type = genomic DNA
tcctgagggtcccgcggaca

SEQ ID NO: 159120 - DNA, 20 bp, Homo sapiens
  source 1..20: mol_type = genomic DNA
cctgagggtcccgcggacac

SEQ ID NO: 159121 - DNA, 20 bp, Homo sapiens
  source 1..20: mol_type = genomic DNA
ctgagggtcccgcggacacc

SEQ ID NO: 159122 - DNA, 20 bp, Homo sapiens
  source 1..20: mol_type = genomic DNA
tgagggtcccgcggacaccg

SEQ ID NO: 159123 - DNA, 20 bp, Homo sapiens
  source 1..20: mol_type = genomic DNA
gagggtcccgcggacaccga

SEQ ID NO: 159124 - DNA, 20 bp, Homo sapiens
  source 1..20: mol_type = genomic DNA
agggtcccgcggacaccgag

SEQ ID NO: 159125 - DNA, 20 bp, Homo sapiens
  source 1..20: mol_type = genomic DNA
gggtcccgcggacaccgagt

SEQ ID NO: 159126 - DNA, 20 bp, Homo sapiens
  source 1..20: mol_type = genomic DNA
ggtcccgcggacaccgagtg

SEQ ID NO: 159127 - DNA, 20 bp, Homo sapiens
  source 1..20: mol_type = genomic DNA
gtcccgcggacaccgagtgg

SEQ ID NO: 159128 - DNA, 20 bp, Homo sapiens
  source 1..20: mol_type = genomic DNA
tcccgcggacaccgagtggc

SEQ ID NO: 159129 - DNA, 20 bp, Homo sapiens
  source 1..20: mol_type = genomic DNA
cccgcggacaccgagtggcg

SEQ ID NO: 159130 - DNA, 20 bp, Homo sapiens
  source 1..20: mol_type = genomic DNA
ccgcggacaccgagtggcgc

SEQ ID NO: 159131 - DNA, 20 bp, Homo sapiens
  source 1..20: mol_type = genomic DNA
cgcggacaccgagtggcgca

SEQ ID NO: 159132 - DNA, 20 bp, Homo sapiens
  source 1..20: mol_type = genomic DNA
gcggacaccgagtggcgcag

SEQ ID NO: 159133 - DNA, 20 bp, Homo sapiens
  source 1..20: mol_type = genomic DNA
cggacaccgagtggcgcagt

SEQ ID NO: 159134 - DNA, 20 bp, Homo sapiens
  source 1..20: mol_type = genomic DNA
ggacaccgagtggcgcagtg

SEQ ID NO: 159135 - DNA, 20 bp, Homo sapiens
  source 1..20: mol_type = genomic DNA
gacaccgagtggcgcagtgc

SEQ ID NO: 159136 - DNA, 20 bp, Homo sapiens
  source 1..20: mol_type = genomic DNA
acaccgagtggcgcagtgcc

SEQ ID NO: 159137 - DNA, 20 bp, Homo sapiens
  source 1..20: mol_type = genomic DNA
caccgagtggcgcagtgcca

SEQ ID NO: 159138 - DNA, 20 bp, Homo sapiens
  source 1..20: mol_type = genomic DNA
accgagtggcgcagtgccag

SEQ ID NO: 159139 - DNA, 20 bp, Homo sapiens
  source 1..20: mol_type = genomic DNA
ccgagtggcgcagtgccagg

SEQ ID NO: 159140 - DNA, 20 bp, Homo sapiens
  source 1..20: mol_type = genomic DNA
cgagtggcgcagtgccaggc

SEQ ID NO: 159141 - DNA, 20 bp, Homo sapiens
  source 1..20: mol_type = genomic DNA
gagtggcgcagtgccaggcc

SEQ ID NO: 159142 - DNA, 20 bp, Homo sapiens
  source 1..20: mol_type = genomic DNA
agtggcgcagtgccaggccc

SEQ ID NO: 159143 - DNA, 20 bp, Homo sapiens
  source 1..20: mol_type = genomic DNA
gtggcgcagtgccaggccca

SEQ ID NO: 159144 - DNA, 20 bp, Homo sapiens
  source 1..20: mol_type = genomic DNA
tggcgcagtgccaggcccag

SEQ ID NO: 159145 - DNA, 20 bp, Homo sapiens
  source 1..20: mol_type = genomic DNA
ggcgcagtgccaggcccagc

SEQ ID NO: 159146 - DNA, 20 bp, Homo sapiens
  source 1..20: mol_type = genomic DNA
gcgcagtgccaggcccagcc

SEQ ID NO: 159147 - DNA, 20 bp, Homo sapiens
  source 1..20: mol_type = genomic DNA
cgcagtgccaggcccagccc

SEQ ID NO: 159148 - DNA, 20 bp, Homo sapiens
  source 1..20: mol_type = genomic DNA
gcagtgccaggcccagcccg

SEQ ID NO: 159149 - DNA, 20 bp, Homo sapiens
  source 1..20: mol_type = genomic DNA
cagtgccaggcccagcccgg

SEQ ID NO: 159150 - DNA, 20 bp, Homo sapiens
  source 1..20: mol_type = genomic DNA
agtgccaggcccagcccggg

SEQ ID NO: 159151 - DNA, 20 bp, Homo sapiens
  source 1..20: mol_type = genomic DNA
gtgccaggcccagcccgggg

SEQ ID NO: 159152 - DNA, 20 bp, Homo sapiens
  source 1..20: mol_type = genomic DNA
tgccaggcccagcccgggga

SEQ ID NO: 159153 - DNA, 20 bp, Homo sapiens
  source 1..20: mol_type = genomic DNA
gccaggcccagcccggggat

SEQ ID NO: 159154 - DNA, 20 bp, Homo sapiens
  source 1..20: mol_type = genomic DNA
ccaggcccagcccggggatg

SEQ ID NO: 159155 - DNA, 20 bp, Homo sapiens
  source 1..20: mol_type = genomic DNA
caggcccagcccggggatgg

SEQ ID NO: 159156 - DNA, 20 bp, Homo sapiens
  source 1..20: mol_type = genomic DNA
aggcccagcccggggatggc

SEQ ID NO: 159157 - DNA, 20 bp, Homo sapiens
  source 1..20: mol_type = genomic DNA
ggcccagcccggggatggcg

SEQ ID NO: 159158 - DNA, 20 bp, Homo sapiens
  source 1..20: mol_type = genomic DNA
gcccagcccggggatggcga

SEQ ID NO: 159159 - DNA, 20 bp, Homo sapiens
  source 1..20: mol_type = genomic DNA
cccagcccggggatggcgac

SEQ ID NO: 159160 - DNA, 20 bp, Homo sapiens
  source 1..20: mol_type = genomic DNA
ccagcccggggatggcgact

SEQ ID NO: 159161 - DNA, 20 bp, Homo sapiens
  source 1..20: mol_type = genomic DNA
cagcccggggatggcgactg

SEQ ID NO: 159162 - DNA, 20 bp, Homo sapiens
  source 1..20: mol_type = genomic DNA
agcccggggatggcgactgc

SEQ ID NO: 159163 - DNA, 20 bp, Homo sapiens
  source 1..20: mol_type = genomic DNA
gcccggggatggcgactgcg

SEQ ID NO: 159164 - DNA, 20 bp, Homo sapiens
  source 1..20: mol_type = genomic DNA
cccggggatggcgactgcgc

SEQ ID NO: 159165 - DNA, 20 bp, Homo sapiens
  source 1..20: mol_type = genomic DNA
ccggggatggcgactgcgcc

SEQ ID NO: 159166 - DNA, 20 bp, Homo sapiens
  source 1..20: mol_type = genomic DNA
cggggatggcgactgcgcct

SEQ ID NO: 159167 - DNA, 20 bp, Homo sapiens
  source 1..20: mol_type = genomic DNA
ggggatggcgactgcgcctg

SEQ ID NO: 159168 - DNA, 20 bp, Homo sapiens
  source 1..20: mol_type = genomic DNA
gggatggcgactgcgcctgg

SEQ ID NO: 159169 - DNA, 20 bp, Homo sapiens
  source 1..20: mol_type = genomic DNA
ggatggcgactgcgcctggg

SEQ ID NO: 159170 - DNA, 20 bp, Homo sapiens
  source 1..20: mol_type = genomic DNA
gatggcgactgcgcctgggc

SEQ ID NO: 159171 - DNA, 20 bp, Homo sapiens
  source 1..20: mol_type = genomic DNA
atggcgactgcgcctgggcc

SEQ ID NO: 159172 - DNA, 20 bp, Homo sapiens
  source 1..20: mol_type = genomic DNA
tggcgactgcgcctgggccc

SEQ ID NO: 159173 - DNA, 20 bp, Homo sapiens
  source 1..20: mol_type = genomic DNA
ggcgactgcgcctgggcccg

SEQ ID NO: 159174 - DNA, 20 bp, Homo sapiens
  source 1..20: mol_type = genomic DNA
gcgactgcgcctgggcccgc

SEQ ID NO: 159175 - DNA, 20 bp, Homo sapiens
  source 1..20: mol_type = genomic DNA
cgactgcgcctgggcccgcc

SEQ ID NO: 159176 - DNA, 20 bp, Homo sapiens
  source 1..20: mol_type = genomic DNA
gactgcgcctgggcccgcct

SEQ ID NO: 159177 - DNA, 20 bp, Homo sapiens
  source 1..20: mol_type = genomic DNA
actgcgcctgggcccgcctg

SEQ ID NO: 159178 - DNA, 20 bp, Homo sapiens
  source 1..20: mol_type = genomic DNA
ctgcgcctgggcccgcctgg

SEQ ID NO: 159179 - DNA, 20 bp, Homo sapiens
  source 1..20: mol_type = genomic DNA
tgcgcctgggcccgcctggt

SEQ ID NO: 159180 - DNA, 20 bp, Homo sapiens
  source 1..20: mol_type = genomic DNA
gcgcctgggcccgcctggtg

SEQ ID NO: 159181 - DNA, 20 bp, Homo sapiens
  source 1..20: mol_type = genomic DNA
cgcctgggcccgcctggtgt

SEQ ID NO: 159182 - DNA, 20 bp, Homo sapiens
  source 1..20: mol_type = genomic DNA
gcctgggcccgcctggtgtc

SEQ ID NO: 159183 - DNA, 20 bp, Homo sapiens
  source 1..20: mol_type = genomic DNA
cctgggcccgcctggtgtct

SEQ ID NO: 159184 - DNA, 20 bp, Homo sapiens
  source 1..20: mol_type = genomic DNA
ctgggcccgcctggtgtctt

SEQ ID NO: 159185 - DNA, 20 bp, Homo sapiens
  source 1..20: mol_type = genomic DNA
tgggcccgcctggtgtcttc

SEQ ID NO: 159186 - DNA, 20 bp, Homo sapiens
  source 1..20: mol_type = genomic DNA
gggcccgcctggtgtcttcg

SEQ ID NO: 159187 - DNA, 20 bp, Homo sapiens
  source 1..20: mol_type = genomic DNA
ggcccgcctggtgtcttcgc

SEQ ID NO: 159188 - DNA, 20 bp, Homo sapiens
  source 1..20: mol_type = genomic DNA
gcccgcctggtgtcttcgca

SEQ ID NO: 159189 - DNA, 20 bp, Homo sapiens
  source 1..20: mol_type = genomic DNA
cccgcctggtgtcttcgcat

SEQ ID NO: 159190 - DNA, 20 bp, Homo sapiens
  source 1..20: mol_type = genomic DNA
ccgcctggtgtcttcgcatc

SEQ ID NO: 159191 - DNA, 20 bp, Homo sapiens
  source 1..20: mol_type = genomic DNA
cgcctggtgtcttcgcatcc

SEQ ID NO: 159192 - DNA, 20 bp, Homo sapiens
  source 1..20: mol_type = genomic DNA
gcctggtgtcttcgcatccc

SEQ ID NO: 159193 - DNA, 20 bp, Homo sapiens
  source 1..20: mol_type = genomic DNA
cctggtgtcttcgcatccct

SEQ ID NO: 159194 - DNA, 20 bp, Homo sapiens
  source 1..20: mol_type = genomic DNA
ctggtgtcttcgcatccctc

SEQ ID NO: 159195 - DNA, 20 bp, Homo sapiens
  source 1..20: mol_type = genomic DNA
tggtgtcttcgcatccctct

SEQ ID NO: 159196 - DNA, 20 bp, Homo sapiens
  source 1..20: mol_type = genomic DNA
ggtgtcttcgcatccctctc

SEQ ID NO: 159197 - DNA, 20 bp, Homo sapiens
  source 1..20: mol_type = genomic DNA
gtgtcttcgcatccctctcc

SEQ ID NO: 159198 - DNA, 20 bp, Homo sapiens
  source 1..20: mol_type = genomic DNA
tgtcttcgcatccctctccg

SEQ ID NO: 159199 - DNA, 20 bp, Homo sapiens
  source 1..20: mol_type = genomic DNA
gtcttcgcatccctctccgc

SEQ ID NO: 159200 - DNA, 20 bp, Homo sapiens
  source 1..20: mol_type = genomic DNA
tcttcgcatccctctccgct

SEQ ID NO: 159201 - DNA, 20 bp, Homo sapiens
  source 1..20: mol_type = genomic DNA
cttcgcatccctctccgctt

SEQ ID NO: 159202 - DNA, 20 bp, Homo sapiens
  source 1..20: mol_type = genomic DNA
ttcgcatccctctccgcttt

SEQ ID NO: 159203 - DNA, 20 bp, Homo sapiens
  source 1..20: mol_type = genomic DNA
tcgcatccctctccgctttc

SEQ ID NO: 159204 - DNA, 20 bp, Homo sapiens
  source 1..20: mol_type = genomic DNA
cgcatccctctccgctttcc

SEQ ID NO: 159205 - DNA, 20 bp, Homo sapiens
  source 1..20: mol_type = genomic DNA
gcatccctctccgctttccg

SEQ ID NO: 159206 - DNA, 20 bp, Homo sapiens
  source 1..20: mol_type = genomic DNA
catccctctccgctttccgg

SEQ ID NO: 159207 - DNA, 20 bp, Homo sapiens
  source 1..20: mol_type = genomic DNA
atccctctccgctttccggc

SEQ ID NO: 159208 - DNA, 20 bp, Homo sapiens
  source 1..20: mol_type = genomic DNA
tccctctccgctttccggct

SEQ ID NO: 159209 - DNA, 20 bp, Homo sapiens
  source 1..20: mol_type = genomic DNA
ccctctccgctttccggctt

SEQ ID NO: 159210 - DNA, 20 bp, Homo sapiens
  source 1..20: mol_type = genomic DNA
cctctccgctttccggcttc

SEQ ID NO: 159211 - DNA, 20 bp, Homo sapiens
  source 1..20: mol_type = genomic DNA
ctctccgctttccggcttca

SEQ ID NO: 159212 - DNA, 20 bp, Homo sapiens
  source 1..20: mol_type = genomic DNA
tctccgctttccggcttcag

SEQ ID NO: 159213 - DNA, 20 bp, Homo sapiens
  source 1..20: mol_type = genomic DNA
ctccgctttccggcttcagc

SEQ ID NO: 159214 - DNA, 20 bp, Homo sapiens
  source 1..20: mol_type = genomic DNA
tccgctttccggcttcagcg

SEQ ID NO: 159215 - DNA, 20 bp, Homo sapiens
  source 1..20: mol_type = genomic DNA
ccgctttccggcttcagcgc

SEQ ID NO: 159216 - DNA, 20 bp, Homo sapiens
  source 1..20: mol_type = genomic DNA
cgctttccggcttcagcgct

SEQ ID NO: 159217 - DNA, 20 bp, Homo sapiens
  source 1..20: mol_type = genomic DNA
gctttccggcttcagcgctc

SEQ ID NO: 159218 - DNA, 20 bp, Homo sapiens
  source 1..20: mol_type = genomic DNA
ctttccggcttcagcgctct

SEQ ID NO: 159219 - DNA, 20 bp, Homo sapiens
  source 1..20: mol_type = genomic DNA
tttccggcttcagcgctcta

SEQ ID NO: 159220 - DNA, 20 bp, Homo sapiens
  source 1..20: mol_type = genomic DNA
ttccggcttcagcgctctag

SEQ ID NO: 159221 - DNA, 20 bp, Homo sapiens
  source 1..20: mol_type = genomic DNA
tccggcttcagcgctctagg

SEQ ID NO: 159222 - DNA, 20 bp, Homo sapiens
  source 1..20: mol_type = genomic DNA
ccggcttcagcgctctaggt

SEQ ID NO: 159223 - DNA, 20 bp, Homo sapiens
  source 1..20: mol_type = genomic DNA
cggcttcagcgctctaggtc

SEQ ID NO: 159224 - DNA, 20 bp, Homo sapiens
  source 1..20: mol_type = genomic DNA
ggcttcagcgctctaggtca

SEQ ID NO: 159225 - DNA, 20 bp, Homo sapiens
  source 1..20: mol_type = genomic DNA
gcttcagcgctctaggtcag

SEQ ID NO: 159226 - DNA, 20 bp, Homo sapiens
  source 1..20: mol_type = genomic DNA
cttcagcgctctaggtcagg

SEQ ID NO: 159227 - DNA, 20 bp, Homo sapiens
  source 1..20: mol_type = genomic DNA
ttcagcgctctaggtcaggg

SEQ ID NO: 159228 - DNA, 20 bp, Homo sapiens
  source 1..20: mol_type = genomic DNA
tcagcgctctaggtcaggga

SEQ ID NO: 159229 - DNA, 20 bp, Homo sapiens
  source 1..20: mol_type = genomic DNA
cagcgctctaggtcagggag

SEQ ID NO: 159230 - DNA, 20 bp, Homo sapiens
  source 1..20: mol_type = genomic DNA
agcgctctaggtcagggagt

SEQ ID NO: 159231 - DNA, 20 bp, Homo sapiens
  source 1..20: mol_type = genomic DNA
gcgctctaggtcagggagtc

SEQ ID NO: 159232 - DNA, 20 bp, Homo sapiens
  source 1..20: mol_type = genomic DNA
cgctctaggtcagggagtct

SEQ ID NO: 159233 - DNA, 20 bp, Homo sapiens
  source 1..20: mol_type = genomic DNA
gctctaggtcagggagtctt

SEQ ID NO: 159234 - DNA, 20 bp, Homo sapiens
  source 1..20: mol_type = genomic DNA
ctctaggtcagggagtcttc

SEQ ID NO: 159235 - DNA, 20 bp, Homo sapiens
  source 1..20: mol_type = genomic DNA
tctaggtcagggagtcttcg

SEQ ID NO: 159236 - DNA, 20 bp, Homo sapiens
  source 1..20: mol_type = genomic DNA
ctaggtcagggagtcttcgc

SEQ ID NO: 159237 - DNA, 20 bp, Homo sapiens
  source 1..20: mol_type = genomic DNA
taggtcagggagtcttcgct

SEQ ID NO: 159238 - DNA, 20 bp, Homo sapiens
  source 1..20: mol_type = genomic DNA
aggtcagggagtcttcgctt

SEQ ID NO: 159239 - DNA, 20 bp, Homo sapiens
  source 1..20: mol_type = genomic DNA
ggtcagggagtcttcgcttt

SEQ ID NO: 159240 - DNA, 20 bp, Homo sapiens
  source 1..20: mol_type = genomic DNA
gtcagggagtcttcgctttt

SEQ ID NO: 159241 - DNA, 20 bp, Homo sapiens
  source 1..20: mol_type = genomic DNA
tcagggagtcttcgcttttg

SEQ ID NO: 159242 - DNA, 20 bp, Homo sapiens
  source 1..20: mol_type = genomic DNA
cagggagtcttcgcttttgt

SEQ ID NO: 159243 - DNA, 20 bp, Homo sapiens
  source 1..20: mol_type = genomic DNA
agggagtcttcgcttttgta

SEQ ID NO: 159244 - DNA, 20 bp, Homo sapiens
  source 1..20: mol_type = genomic DNA
gggagtcttcgcttttgtac

SEQ ID NO: 159245 - DNA, 20 bp, Homo sapiens
  source 1..20: mol_type = genomic DNA
ggagtcttcgcttttgtaca

SEQ ID NO: 159246 - DNA, 20 bp, Homo sapiens
  source 1..20: mol_type = genomic DNA
gagtcttcgcttttgtacag

SEQ ID NO: 159247 - DNA, 20 bp, Homo sapiens
  source 1..20: mol_type = genomic DNA
agtcttcgcttttgtacagc

SEQ ID NO: 159248 - DNA, 20 bp, Homo sapiens
  source 1..20: mol_type = genomic DNA
gtcttcgcttttgtacagct

SEQ ID NO: 159249 - DNA, 20 bp, Homo sapiens
  source 1..20: mol_type = genomic DNA
tcttcgcttttgtacagctc

SEQ ID NO: 159250 - DNA, 20 bp, Homo sapiens
  source 1..20: mol_type = genomic DNA
cttcgcttttgtacagctct

SEQ ID NO: 159251 - DNA, 20 bp, Homo sapiens
  source 1..20: mol_type = genomic DNA
ttcgcttttgtacagctcta

SEQ ID NO: 159252 - DNA, 20 bp, Homo sapiens
  source 1..20: mol_type = genomic DNA
tcgcttttgtacagctctaa

SEQ ID NO: 159253 - DNA, 20 bp, Homo sapiens
  source 1..20: mol_type = genomic DNA
cgcttttgtacagctctaag

SEQ ID NO: 159254 - DNA, 20 bp, Homo sapiens
  source 1..20: mol_type = genomic DNA
gcttttgtacagctctaagg

SEQ ID NO: 159255 - DNA, 20 bp, Homo sapiens
  source 1..20: mol_type = genomic DNA
cttttgtacagctctaaggc

SEQ ID NO: 159256 - DNA, 20 bp, Homo sapiens
  source 1..20: mol_type = genomic DNA
ttttgtacagctctaaggct

SEQ ID NO: 159257 - DNA, 20 bp, Homo sapiens
  source 1..20: mol_type = genomic DNA
tttgtacagctctaaggcta

SEQ ID NO: 159258 - DNA, 20 bp, Homo sapiens
  source 1..20: mol_type = genomic DNA
ttgtacagctctaaggctag

SEQ ID NO: 159259 - DNA, 20 bp, Homo sapiens
  source 1..20: mol_type = genomic DNA
tgtacagctctaaggctagg

SEQ ID NO: 159260 - DNA, 20 bp, Homo sapiens
  source 1..20: mol_type = genomic DNA
gtacagctctaaggctagga

SEQ ID NO: 159261 - DNA, 20 bp, Homo sapiens
  source 1..20: mol_type = genomic DNA
tacagctctaaggctaggaa

SEQ ID NO: 159262 - DNA, 20 bp, Homo sapiens
  source 1..20: mol_type = genomic DNA
acagctctaaggctaggaat

SEQ ID NO: 159263 - DNA, 20 bp, Homo sapiens
  source 1..20: mol_type = genomic DNA
cagctctaaggctaggaatg

SEQ ID NO: 159264 - DNA, 20 bp, Homo sapiens
  source 1..20: mol_type = genomic DNA
agctctaaggctaggaatgg

SEQ ID NO: 159265 - DNA, 20 bp, Homo sapiens
  source 1..20: mol_type = genomic DNA
gctctaaggctaggaatggt

SEQ ID NO: 159266 - DNA, 20 bp, Homo sapiens
  source 1..20: mol_type = genomic DNA
ctctaaggctaggaatggtt

SEQ ID NO: 159267 - DNA, 20 bp, Homo sapiens
  source 1..20: mol_type = genomic DNA
tctaaggctaggaatggttt

SEQ ID NO: 159268 - DNA, 20 bp, Homo sapiens
  source 1..20: mol_type = genomic DNA
ctaaggctaggaatggtttt

SEQ ID NO: 159269 - DNA, 20 bp, Homo sapiens
  source 1..20: mol_type = genomic DNA
taaggctaggaatggttttt

SEQ ID NO: 159270 - DNA, 20 bp, Homo sapiens
  source 1..20: mol_type = genomic DNA
aaggctaggaatggttttta

SEQ ID NO: 159271 - DNA, 20 bp, Homo sapiens
  source 1..20: mol_type = genomic DNA
aggctaggaatggtttttat

SEQ ID NO: 159272 - DNA, 20 bp, Homo sapiens
  source 1..20: mol_type = genomic DNA
ggctaggaatggtttttata

SEQ ID NO: 159273 - DNA, 20 bp, Homo sapiens
  source 1..20: mol_type = genomic DNA
gctaggaatggtttttatat

SEQ ID NO: 159274 - DNA, 20 bp, Homo sapiens
  source 1..20: mol_type = genomic DNA
ctaggaatggtttttatatt

SEQ ID NO: 159275 - DNA, 20 bp, Homo sapiens
  source 1..20: mol_type = genomic DNA
taggaatggtttttatattt

SEQ ID NO: 159276 - DNA, 20 bp, Homo sapiens
  source 1..20: mol_type = genomic DNA
aggaatggtttttatatttt

SEQ ID NO: 159277 - DNA, 20 bp, Homo sapiens
  source 1..20: mol_type = genomic DNA
ggaatggtttttatattttt

SEQ ID NO: 159278 - DNA, 20 bp, Homo sapiens
  source 1..20: mol_type = genomic DNA
gaatggtttttatattttta

SEQ ID NO: 159279 - DNA, 20 bp, Homo sapiens
  source 1..20: mol_type = genomic DNA
aatggtttttatatttttaa

SEQ ID NO: 159280 - DNA, 20 bp, Homo sapiens
  source 1..20: mol_type = genomic DNA
atggtttttatatttttaaa

SEQ ID NO: 159281 - DNA, 20 bp, Homo sapiens
  source 1..20: mol_type = genomic DNA
tggtttttatatttttaaaa

SEQ ID NO: 159282 - DNA, 20 bp, Homo sapiens
  source 1..20: mol_type = genomic DNA
ggtttttatatttttaaaag

SEQ ID NO: 159283 - DNA, 20 bp, Homo sapiens
  source 1..20: mol_type = genomic DNA
gtttttatatttttaaaagg

SEQ ID NO: 159284 - DNA, 20 bp, Homo sapiens
  source 1..20: mol_type = genomic DNA
tttttatatttttaaaaggc

SEQ ID NO: 159285 - DNA, 20 bp, Homo sapiens
  source 1..20: mol_type = genomic DNA
ttttatatttttaaaaggct

SEQ ID NO: 159286 - DNA, 20 bp, Homo sapiens
  source 1..20: mol_type = genomic DNA
tttatatttttaaaaggctt

SEQ ID NO: 159287 - DNA, 20 bp, Homo sapiens
  source 1..20: mol_type = genomic DNA
ttatatttttaaaaggcttt

SEQ ID NO: 159288 - DNA, 20 bp, Homo sapiens
  source 1..20: mol_type = genomic DNA
tatatttttaaaaggctttg

SEQ ID NO: 159289 - DNA, 20 bp, Homo sapiens
  source 1..20: mol_type = genomic DNA
atatttttaaaaggctttgg

SEQ ID NO: 159290 - DNA, 20 bp, Homo sapiens
  source 1..20: mol_type = genomic DNA
tatttttaaaaggctttgga

SEQ ID NO: 159291 - DNA, 20 bp, Homo sapiens
  source 1..20: mol_type = genomic DNA
atttttaaaaggctttggaa

SEQ ID NO: 159292 - DNA, 20 bp, Homo sapiens
  source 1..20: mol_type = genomic DNA
tttttaaaaggctttggaaa

SEQ ID NO: 159293 - DNA, 20 bp, Homo sapiens
  source 1..20: mol_type = genomic DNA
ttttaaaaggctttggaaaa

SEQ ID NO: 159294 - DNA, 20 bp, Homo sapiens
  source 1..20: mol_type = genomic DNA
tttaaaaggctttggaaaac

SEQ ID NO: 159295 - DNA, 20 bp, Homo sapiens
  source 1..20: mol_type = genomic DNA
ttaaaaggctttggaaaaca

SEQ ID NO: 159296 - DNA, 20 bp, Homo sapiens
  source 1..20: mol_type = genomic DNA
taaaaggctttggaaaacaa

SEQ ID NO: 159297 - DNA, 20 bp, Homo sapiens
  source 1..20: mol_type = genomic DNA
aaaaggctttggaaaacaaa

SEQ ID NO: 159298 - DNA, 20 bp, Homo sapiens
  source 1..20: mol_type = genomic DNA
aaaggctttggaaaacaaaa

SEQ ID NO: 159299 - DNA, 20 bp, Homo sapiens
  source 1..20: mol_type = genomic DNA
aaggctttggaaaacaaaaa

SEQ ID NO: 159300 - DNA, 20 bp, Homo sapiens
  source 1..20: mol_type = genomic DNA
aggctttggaaaacaaaaat

SEQ ID NO: 159301 - DNA, 20 bp, Homo sapiens
  source 1..20: mol_type = genomic DNA
ggctttggaaaacaaaaata

SEQ ID NO: 159302 - DNA, 20 bp, Homo sapiens
  source 1..20: mol_type = genomic DNA
gctttggaaaacaaaaatac

SEQ ID NO: 159303 - DNA, 20 bp, Homo sapiens
  source 1..20: mol_type = genomic DNA
ctttggaaaacaaaaatacg

SEQ ID NO: 159304 - DNA, 20 bp, Homo sapiens
  source 1..20: mol_type = genomic DNA
tttggaaaacaaaaatacgc

SEQ ID NO: 159305 - DNA, 20 bp, Homo sapiens
  source 1..20: mol_type = genomic DNA
ttggaaaacaaaaatacgca

SEQ ID NO: 159306 - DNA, 20 bp, Homo sapiens
  source 1..20: mol_type = genomic DNA
tggaaaacaaaaatacgcaa

SEQ ID NO: 159307 - DNA, 20 bp, Homo sapiens
  source 1..20: mol_type = genomic DNA
ggaaaacaaaaatacgcaac

SEQ ID NO: 159308 - DNA, 20 bp, Homo sapiens
  source 1..20: mol_type = genomic DNA
gaaaacaaaaatacgcaaca

SEQ ID NO: 159309 - DNA, 20 bp, Homo sapiens
  source 1..20: mol_type = genomic DNA
aaaacaaaaatacgcaacag

SEQ ID NO: 159310 - DNA, 20 bp, Homo sapiens
  source 1..20: mol_type = genomic DNA
aaacaaaaatacgcaacaga

SEQ ID NO: 159311 - DNA, 20 bp, Homo sapiens
  source 1..20: mol_type = genomic DNA
aacaaaaatacgcaacagag

SEQ ID NO: 159312 - DNA, 20 bp, Homo sapiens
  source 1..20: mol_type = genomic DNA
acaaaaatacgcaacagaga

SEQ ID NO: 159313 - DNA, 20 bp, Homo sapiens
  source 1..20: mol_type = genomic DNA
caaaaatacgcaacagagac

SEQ ID NO: 159314 - DNA, 20 bp, Homo sapiens
  source 1..20: mol_type = genomic DNA
aaaaatacgcaacagagacc

SEQ ID NO: 159315 - DNA, 20 bp, Homo sapiens
  source 1..20: mol_type = genomic DNA
aaaatacgcaacagagaccg

SEQ ID NO: 159316 - DNA, 20 bp, Homo sapiens
  source 1..20: mol_type = genomic DNA
aaatacgcaacagagaccgt

SEQ ID NO: 159317 - DNA, 20 bp, Homo sapiens
  source 1..20: mol_type = genomic DNA
aatacgcaacagagaccgtt

SEQ ID NO: 159318 - DNA, 20 bp, Homo sapiens
  source 1..20: mol_type = genomic DNA
atacgcaacagagaccgttt

SEQ ID NO: 159319 - DNA, 20 bp, Homo sapiens
  source 1..20: mol_type = genomic DNA
tacgcaacagagaccgtttg

SEQ ID NO: 159320 - DNA, 20 bp, Homo sapiens
  source 1..20: mol_type = genomic DNA
acgcaacagagaccgtttgt

SEQ ID NO: 159321 - DNA, 20 bp, Homo sapiens
  source 1..20: mol_type = genomic DNA
cgcaacagagaccgtttgtg

SEQ ID NO: 159322 - DNA, 20 bp, Homo sapiens
  source 1..20: mol_type = genomic DNA
gcaacagagaccgtttgtgt

SEQ ID NO: 159323 - DNA, 20 bp, Homo sapiens
  source 1..20: mol_type = genomic DNA
caacagagaccgtttgtgtg

SEQ ID NO: 159324 - DNA, 20 bp, Homo sapiens
  source 1..20: mol_type = genomic DNA
aacagagaccgtttgtgtga

SEQ ID NO: 159325 - DNA, 20 bp, Homo sapiens
  source 1..20: mol_type = genomic DNA
acagagaccgtttgtgtgac

SEQ ID NO: 159326 - DNA, 20 bp, Homo sapiens
  source 1..20: mol_type = genomic DNA
cagagaccgtttgtgtgaca

SEQ ID NO: 159327 - DNA, 20 bp, Homo sapiens
  source 1..20: mol_type = genomic DNA
agagaccgtttgtgtgacac

SEQ ID NO: 159328 - DNA, 20 bp, Homo sapiens
  source 1..20: mol_type = genomic DNA
gagaccgtttgtgtgacact

SEQ ID NO: 159329 - DNA, 20 bp, Homo sapiens
  source 1..20: mol_type = genomic DNA
agaccgtttgtgtgacactt

SEQ ID NO: 159330 - DNA, 20 bp, Homo sapiens
  source 1..20: mol_type = genomic DNA
gaccgtttgtgtgacacttt

SEQ ID NO: 159331 - DNA, 20 bp, Homo sapiens
  source 1..20: mol_type = genomic DNA
accgtttgtgtgacactttg

SEQ ID NO: 159332 - DNA, 20 bp, Homo sapiens
  source 1..20: mol_type = genomic DNA
ccgtttgtgtgacactttgc

SEQ ID NO: 159333 - DNA, 20 bp, Homo sapiens
  source 1..20: mol_type = genomic DNA
cgtttgtgtgacactttgca

SEQ ID NO: 159334 - DNA, 20 bp, Homo sapiens
  source 1..20: mol_type = genomic DNA
gtttgtgtgacactttgcag

SEQ ID NO: 159335 - DNA, 20 bp, Homo sapiens
  source 1..20: mol_type = genomic DNA
tttgtgtgacactttgcagg

SEQ ID NO: 159336 - DNA, 20 bp, Homo sapiens
  source 1..20: mol_type = genomic DNA
ttgtgtgacactttgcaggg

SEQ ID NO: 159337 - DNA, 20 bp, Homo sapiens
  source 1..20: mol_type = genomic DNA
tgtgtgacactttgcaggga

SEQ ID NO: 159338 - DNA, 20 bp, Homo sapiens
  source 1..20: mol_type = genomic DNA
gtgtgacactttgcagggaa

SEQ ID NO: 159339 - DNA, 20 bp, Homo sapiens
  source 1..20: mol_type = genomic DNA
tgtgacactttgcagggaag

SEQ ID NO: 159340 - DNA, 20 bp, Homo sapiens
  source 1..20: mol_type = genomic DNA
gtgacactttgcagggaagt

SEQ ID NO: 159341 - DNA, 20 bp, Homo sapiens
  source 1..20: mol_type = genomic DNA
tgacactttgcagggaagtt

SEQ ID NO: 159342 - DNA, 20 bp, Homo sapiens
  source 1..20: mol_type = genomic DNA
gacactttgcagggaagttt

SEQ ID NO: 159343 - DNA, 20 bp, Homo sapiens
  source 1..20: mol_type = genomic DNA
acactttgcagggaagtttg

SEQ ID NO: 159344 - DNA, 20 bp, Homo sapiens
  source 1..20: mol_type = genomic DNA
cactttgcagggaagtttgc

SEQ ID NO: 159345 - DNA, 20 bp, Homo sapiens
  source 1..20: mol_type = genomic DNA
actttgcagggaagtttgct

SEQ ID NO: 159346 - DNA, 20 bp, Homo sapiens
  source 1..20: mol_type = genomic DNA
ctttgcagggaagtttgctg

SEQ ID NO: 159347 - DNA, 20 bp, Homo sapiens
  source 1..20: mol_type = genomic DNA
tttgcagggaagtttgctgg

SEQ ID NO: 159348 - DNA, 20 bp, Homo sapiens
  source 1..20: mol_type = genomic DNA
ttgcagggaagtttgctggc

SEQ ID NO: 159349 - DNA, 20 bp, Homo sapiens
  source 1..20: mol_type = genomic DNA
tgcagggaagtttgctggcc

SEQ ID NO: 159350 - DNA, 20 bp, Homo sapiens
  source 1..20: mol_type = genomic DNA
gcagggaagtttgctggcct

SEQ ID NO: 159351 - DNA, 20 bp, Homo sapiens
  source 1..20: mol_type = genomic DNA
cagggaagtttgctggcctc

SEQ ID NO: 159352 - DNA, 20 bp, Homo sapiens
  source 1..20: mol_type = genomic DNA
agggaagtttgctggcctct

SEQ ID NO: 159353 - DNA, 20 bp, Homo sapiens
  source 1..20: mol_type = genomic DNA
gggaagtttgctggcctctg

SEQ ID NO: 159354 - DNA, 20 bp, Homo sapiens
  source 1..20: mol_type = genomic DNA
ggaagtttgctggcctctgt

SEQ ID NO: 159355 - DNA, 20 bp, Homo sapiens
  source 1..20: mol_type = genomic DNA
gaagtttgctggcctctgtt

SEQ ID NO: 159356 - DNA, 20 bp, Homo sapiens
  source 1..20: mol_type = genomic DNA
aagtttgctggcctctgttc

SEQ ID NO: 159357 - DNA, 20 bp, Homo sapiens
  source 1..20: mol_type = genomic DNA
agtttgctggcctctgttct

SEQ ID NO: 159358 - DNA, 20 bp, Homo sapiens
  source 1..20: mol_type = genomic DNA
gtttgctggcctctgttcta

SEQ ID NO: 159359 - DNA, 20 bp, Homo sapiens
  source 1..20: mol_type = genomic DNA
tttgctggcctctgttctag

SEQ ID NO: 159360 - DNA, 20 bp, Homo sapiens
  source 1..20: mol_type = genomic DNA
ttgctggcctctgttctagg

SEQ ID NO: 159361 - DNA, 20 bp, Homo sapiens
  source 1..20: mol_type = genomic DNA
tgctggcctctgttctaggt

SEQ ID NO: 159362 - DNA, 20 bp, Homo sapiens
  source 1..20: mol_type = genomic DNA
gctggcctctgttctaggtc

SEQ ID NO: 159363 - DNA, 20 bp, Homo sapiens
  source 1..20: mol_type = genomic DNA
ctggcctctgttctaggtca

SEQ ID NO: 159364 - DNA, 20 bp, Homo sapiens
  source 1..20: mol_type = genomic DNA
tggcctctgttctaggtcat

SEQ ID NO: 159365 - DNA, 20 bp, Homo sapiens
  source 1..20: mol_type = genomic DNA
ggcctctgttctaggtcatg

SEQ ID NO: 159366 - DNA, 20 bp, Homo sapiens
  source 1..20: mol_type = genomic DNA
gcctctgttctaggtcatga

SEQ ID NO: 159367 - DNA, 20 bp, Homo sapiens
  source 1..20: mol_type = genomic DNA
cctctgttctaggtcatgat

SEQ ID NO: 159368 - DNA, 20 bp, Homo sapiens
  source 1..20: mol_type = genomic DNA
ctctgttctaggtcatgatt

SEQ ID NO: 159369 - DNA, 20 bp, Homo sapiens
  source 1..20: mol_type = genomic DNA
tctgttctaggtcatgattg

SEQ ID NO: 159370 - DNA, 20 bp, Homo sapiens
  source 1..20: mol_type = genomic DNA
ctgttctaggtcatgattgg

SEQ ID NO: 159371 - DNA, 20 bp, Homo sapiens
  source 1..20: mol_type = genomic DNA
tgttctaggtcatgattggg

SEQ ID NO: 159372 - DNA, 20 bp, Homo sapiens
  source 1..20: mol_type = genomic DNA
gttctaggtcatgattgggc

SEQ ID NO: 159373 - DNA, 20 bp, Homo sapiens
  source 1..20: mol_type = genomic DNA
ttctaggtcatgattgggct

SEQ ID NO: 159374 - DNA, 20 bp, Homo sapiens
  source 1..20: mol_type = genomic DNA
tctaggtcatgattgggctg

SEQ ID NO: 159375 - DNA, 20 bp, Homo sapiens
  source 1..20: mol_type = genomic DNA
ctaggtcatgattgggctgc

SEQ ID NO: 159376 - DNA, 20 bp, Homo sapiens
  source 1..20: mol_type = genomic DNA
taggtcatgattgggctgca

SEQ ID NO: 159377 - DNA, 20 bp, Homo sapiens
  source 1..20: mol_type = genomic DNA
aggtcatgattgggctgcaa

SEQ ID NO: 159378 - DNA, 20 bp, Homo sapiens
  source 1..20: mol_type = genomic DNA
ggtcatgattgggctgcaag

SEQ ID NO: 159379 - DNA, 20 bp, Homo sapiens
  source 1..20: mol_type = genomic DNA
gtcatgattgggctgcaagg

SEQ ID NO: 159380 - DNA, 20 bp, Homo sapiens
  source 1..20: mol_type = genomic DNA
tcatgattgggctgcaaggg

SEQ ID NO: 159381 - DNA, 20 bp, Homo sapiens
  source 1..20: mol_type = genomic DNA
catgattgggctgcaagggc

SEQ ID NO: 159382 - DNA, 20 bp, Homo sapiens
  source 1..20: mol_type = genomic DNA
atgattgggctgcaagggca

SEQ ID NO: 159383 - DNA, 20 bp, Homo sapiens
  source 1..20: mol_type = genomic DNA
tgattgggctgcaagggcag

SEQ ID NO: 159384 - DNA, 20 bp, Homo sapiens
  source 1..20: mol_type = genomic DNA
gattgggctgcaagggcaga

SEQ ID NO: 159385 - DNA, 20 bp, Homo sapiens
  source 1..20: mol_type = genomic DNA
attgggctgcaagggcagag

SEQ ID NO: 159386 - DNA, 20 bp, Homo sapiens
  source 1..20: mol_type = genomic DNA
ttgggctgcaagggcagaga

SEQ ID NO: 159387 - DNA, 20 bp, Homo sapiens
  source 1..20: mol_type = genomic DNA
tgggctgcaagggcagagaa

SEQ ID NO: 159388 - DNA, 20 bp, Homo sapiens
  source 1..20: mol_type = genomic DNA
gggctgcaagggcagagaag

SEQ ID NO: 159389 - DNA, 20 bp, Homo sapiens
  source 1..20: mol_type = genomic DNA
ggctgcaagggcagagaagg

SEQ ID NO: 159390 - DNA, 20 bp, Homo sapiens
  source 1..20: mol_type = genomic DNA
gctgcaagggcagagaaggt

SEQ ID NO: 159391 - DNA, 20 bp, Homo sapiens
  source 1..20: mol_type = genomic DNA
ctgcaagggcagagaaggta

SEQ ID NO: 159392 - DNA, 20 bp, Homo sapiens
  source 1..20: mol_type = genomic DNA
tgcaagggcagagaaggtag

SEQ ID NO: 159393 - DNA, 20 bp, Homo sapiens
  source 1..20: mol_type = genomic DNA
gcaagggcagagaaggtagc

SEQ ID NO: 159394 - DNA, 20 bp, Homo sapiens
  source 1..20: mol_type = genomic DNA
caagggcagagaaggtagcc

SEQ ID NO: 159395 - DNA, 20 bp, Homo sapiens
  source 1..20: mol_type = genomic DNA
aagggcagagaaggtagcct

SEQ ID NO: 159396 - DNA, 20 bp, Homo sapiens
  source 1..20: mol_type = genomic DNA
agggcagagaaggtagcctt

SEQ ID NO: 159397 - DNA, 20 bp, Homo sapiens
  source 1..20: mol_type = genomic DNA
gggcagagaaggtagccttg

SEQ ID NO: 159398 - DNA, 20 bp, Homo sapiens
  source 1..20: mol_type = genomic DNA
ggcagagaaggtagccttga

SEQ ID NO: 159399 - DNA, 20 bp, Homo sapiens
  source 1..20: mol_type = genomic DNA
gcagagaaggtagccttgaa

SEQ ID NO: 159400 - DNA, 20 bp, Homo sapiens
  source 1..20: mol_type = genomic DNA
cagagaaggtagccttgaac

SEQ ID NO: 159401 - DNA, 20 bp, Homo sapiens
  source 1..20: mol_type = genomic DNA
agagaaggtagccttgaaca

SEQ ID NO: 159402 - DNA, 20 bp, Homo sapiens
  source 1..20: mol_type = genomic DNA
gagaaggtagccttgaacag

SEQ ID NO: 159403 - DNA, 20 bp, Homo sapiens
  source 1..20: mol_type = genomic DNA
agaaggtagccttgaacaga

SEQ ID NO: 159404 - DNA, 20 bp, Homo sapiens
  source 1..20: mol_type = genomic DNA
gaaggtagccttgaacagag

SEQ ID NO: 159405 - DNA, 20 bp, Homo sapiens
  source 1..20: mol_type = genomic DNA
aaggtagccttgaacagagg

SEQ ID NO: 159406 - DNA, 20 bp, Homo sapiens
  source 1..20: mol_type = genomic DNA
aggtagccttgaacagaggt

SEQ ID NO: 159407 - DNA, 20 bp, Homo sapiens
  source 1..20: mol_type = genomic DNA
ggtagccttgaacagaggtc

SEQ ID NO: 159408 - DNA, 20 bp, Homo sapiens
  source 1..20: mol_type = genomic DNA
gtagccttgaacagaggtcc

SEQ ID NO: 159409 - DNA, 20 bp, Homo sapiens
  source 1..20: mol_type = genomic DNA
tagccttgaacagaggtcct

SEQ ID NO: 159410 - DNA, 20 bp, Homo sapiens
  source 1..20: mol_type = genomic DNA
agccttgaacagaggtcctt

SEQ ID NO: 159411 - DNA, 20 bp, Homo sapiens
  source 1..20: mol_type = genomic DNA
gccttgaacagaggtccttt

SEQ ID NO: 159412 - DNA, 20 bp, Homo sapiens
  source 1..20: mol_type = genomic DNA
ccttgaacagaggtcctttt

SEQ ID NO: 159413 - DNA, 20 bp, Homo sapiens
  source 1..20: mol_type = genomic DNA
cttgaacagaggtccttttc

SEQ ID NO: 159414 - DNA, 20 bp, Homo sapiens
  source 1..20: mol_type = genomic DNA
ttgaacagaggtccttttcc

SEQ ID NO: 159415 - DNA, 20 bp, Homo sapiens
  source 1..20: mol_type = genomic DNA
tgaacagaggtccttttcct

SEQ ID NO: 159416 - DNA, 20 bp, Homo sapiens
  source 1..20: mol_type = genomic DNA
gaacagaggtccttttcctc

SEQ ID NO: 159417 - DNA, 20 bp, Homo sapiens
  source 1..20: mol_type = genomic DNA
aacagaggtccttttcctcc

SEQ ID NO: 159418 - DNA, 20 bp, Homo sapiens
  source 1..20: mol_type = genomic DNA
acagaggtccttttcctcct

SEQ ID NO: 159419 - DNA, 20 bp, Homo sapiens
  source 1..20: mol_type = genomic DNA
cagaggtccttttcctcctc

SEQ ID NO: 159420 - DNA, 20 bp, Homo sapiens
  source 1..20: mol_type = genomic DNA
agaggtccttttcctcctcc

SEQ ID NO: 159421 - DNA, 20 bp, Homo sapiens
  source 1..20: mol_type = genomic DNA
gaggtccttttcctcctcct

SEQ ID NO: 159422 - DNA, 20 bp, Homo sapiens
  source 1..20: mol_type = genomic DNA
aggtccttttcctcctccta

SEQ ID NO: 159423 - DNA, 20 bp, Homo sapiens
  source 1..20: mol_type = genomic DNA
ggtccttttcctcctcctaa

SEQ ID NO: 159424 - DNA, 20 bp, Homo sapiens
  source 1..20: mol_type = genomic DNA
gtccttttcctcctcctaag

SEQ ID NO: 159425 - DNA, 20 bp, Homo sapiens
  source 1..20: mol_type = genomic DNA
tccttttcctcctcctaagc

SEQ ID NO: 159426 - DNA, 20 bp, Homo sapiens
  source 1..20: mol_type = genomic DNA
ccttttcctcctcctaagct

SEQ ID NO: 159427 - DNA, 20 bp, Homo sapiens
  source 1..20: mol_type = genomic DNA
cttttcctcctcctaagctc

SEQ ID NO: 159428 - DNA, 20 bp, Homo sapiens
  source 1..20: mol_type = genomic DNA
ttttcctcctcctaagctcc

SEQ ID NO: 159429 - DNA, 20 bp, Homo sapiens
  source 1..20: mol_type = genomic DNA
tttcctcctcctaagctccg

SEQ ID NO: 159430 - DNA, 20 bp, Homo sapiens
  source 1..20: mol_type = genomic DNA
ttcctcctcctaagctccgg

SEQ ID NO: 159431 - DNA, 20 bp, Homo sapiens
  source 1..20: mol_type = genomic DNA
tcctcctcctaagctccggg

SEQ ID NO: 159432 - DNA, 20 bp, Homo sapiens
  source 1..20: mol_type = genomic DNA
cctcctcctaagctccggga

SEQ ID NO: 159433 - DNA, 20 bp, Homo sapiens
  source 1..20: mol_type = genomic DNA
ctcctcctaagctccgggag

SEQ ID NO: 159434 - DNA, 20 bp, Homo sapiens
  source 1..20: mol_type = genomic DNA
tcctcctaagctccgggagc

SEQ ID NO: 159435 - DNA, 20 bp, Homo sapiens
  source 1..20: mol_type = genomic DNA
cctcctaagctccgggagcc

SEQ ID NO: 159436 - DNA, 20 bp, Homo sapiens
  source 1..20: mol_type = genomic DNA
ctcctaagctccgggagcca

SEQ ID NO: 159437 - DNA, 20 bp, Homo sapiens
  source 1..20: mol_type = genomic DNA
tcctaagctccgggagccag

SEQ ID NO: 159438 - DNA, 20 bp, Homo sapiens
  source 1..20: mol_type = genomic DNA
cctaagctccgggagccaga

SEQ ID NO: 159439 - DNA, 20 bp, Homo sapiens
  source 1..20: mol_type = genomic DNA
ctaagctccgggagccagag

SEQ ID NO: 159440 - DNA, 20 bp, Homo sapiens
  source 1..20: mol_type = genomic DNA
taagctccgggagccagagg

SEQ ID NO: 159441 - DNA, 20 bp, Homo sapiens
  source 1..20: mol_type = genomic DNA
aagctccgggagccagaggt

SEQ ID NO: 159442 - DNA, 20 bp, Homo sapiens
  source 1..20: mol_type = genomic DNA
agctccgggagccagaggtt

SEQ ID NO: 159443 - DNA, 20 bp, Homo sapiens
  source 1..20: mol_type = genomic DNA
gctccgggagccagaggttt

SEQ ID NO: 159444 - DNA, 20 bp, Homo sapiens
  source 1..20: mol_type = genomic DNA
ctccgggagccagaggttta

SEQ ID NO: 159445 - DNA, 20 bp, Homo sapiens
  source 1..20: mol_type = genomic DNA
tccgggagccagaggtttaa

SEQ ID NO: 159446 - DNA, 20 bp, Homo sapiens
  source 1..20: mol_type = genomic DNA
ccgggagccagaggtttaac

SEQ ID NO: 159447 - DNA, 20 bp, Homo sapiens
  source 1..20: mol_type = genomic DNA
cgggagccagaggtttaact

SEQ ID NO: 159448 - DNA, 20 bp, Homo sapiens
  source 1..20: mol_type = genomic DNA
gggagccagaggtttaactg

SEQ ID NO: 159449 - DNA, 20 bp, Homo sapiens
  source 1..20: mol_type = genomic DNA
ggagccagaggtttaactga

SEQ ID NO: 159450 - DNA, 20 bp, Homo sapiens
  source 1..20: mol_type = genomic DNA
gagccagaggtttaactgac

SEQ ID NO: 159451 - DNA, 20 bp, Homo sapiens
  source 1..20: mol_type = genomic DNA
agccagaggtttaactgacc

SEQ ID NO: 159452 - DNA, 20 bp, Homo sapiens
  source 1..20: mol_type = genomic DNA
gccagaggtttaactgaccc

SEQ ID NO: 159453 - DNA, 20 bp, Homo sapiens
  source 1..20: mol_type = genomic DNA
ccagaggtttaactgaccct

SEQ ID NO: 159454 - DNA, 20 bp, Homo sapiens
  source 1..20: mol_type = genomic DNA
cagaggtttaactgaccctt

SEQ ID NO: 159455 - DNA, 20 bp, Homo sapiens
  source 1..20: mol_type = genomic DNA
agaggtttaactgacccttt

SEQ ID NO: 159456 - DNA, 20 bp, Homo sapiens
  source 1..20: mol_type = genomic DNA
gaggtttaactgaccctttt

SEQ ID NO: 159457 - DNA, 20 bp, Homo sapiens
  source 1..20: mol_type = genomic DNA
aggtttaactgacccttttg

SEQ ID NO: 159458 - DNA, 20 bp, Homo sapiens
  source 1..20: mol_type = genomic DNA
ggtttaactgacccttttgg

SEQ ID NO: 159459 - DNA, 20 bp, Homo sapiens
  source 1..20: mol_type = genomic DNA
gtttaactgacccttttggg

SEQ ID NO: 159460 - DNA, 20 bp, Homo sapiens
  source 1..20: mol_type = genomic DNA
tttaactgacccttttgggg

SEQ ID NO: 159461 - DNA, 20 bp, Homo sapiens
  source 1..20: mol_type = genomic DNA
ttaactgacccttttgggga

SEQ ID NO: 159462 - DNA, 20 bp, Homo sapiens
  source 1..20: mol_type = genomic DNA
taactgacccttttggggat

SEQ ID NO: 159463 - DNA, 20 bp, Homo sapiens
  source 1..20: mol_type = genomic DNA
aactgacccttttggggatt

SEQ ID NO: 159464 - DNA, 20 bp, Homo sapiens
  source 1..20: mol_type = genomic DNA
actgacccttttggggattt

SEQ ID NO: 159465 - DNA, 20 bp, Homo sapiens
  source 1..20: mol_type = genomic DNA
ctgacccttttggggatttt

SEQ ID NO: 159466 - DNA, 20 bp, Homo sapiens
  source 1..20: mol_type = genomic DNA
tgacccttttggggattttt

SEQ ID NO: 159467 - DNA, 20 bp, Homo sapiens
  source 1..20: mol_type = genomic DNA
gacccttttggggatttttg

SEQ ID NO: 159468 - DNA, 20 bp, Homo sapiens
  source 1..20: mol_type = genomic DNA
acccttttggggatttttga

SEQ ID NO: 159469 - DNA, 20 bp, Homo sapiens
  source 1..20: mol_type = genomic DNA
cccttttggggatttttgag

SEQ ID NO: 159470 - DNA, 20 bp, Homo sapiens
  source 1..20: mol_type = genomic DNA
ccttttggggatttttgagg

SEQ ID NO: 159471 - DNA, 20 bp, Homo sapiens
  source 1..20: mol_type = genomic DNA
cttttggggatttttgaggg

SEQ ID NO: 159472 - DNA, 20 bp, Homo sapiens
  source 1..20: mol_type = genomic DNA
ttttggggatttttgagggc

SEQ ID NO: 159473 - DNA, 20 bp, Homo sapiens
  source 1..20: mol_type = genomic DNA
tttggggatttttgagggca

SEQ ID NO: 159474 - DNA, 20 bp, Homo sapiens
  source 1..20: mol_type = genomic DNA
ttggggatttttgagggcag

SEQ ID NO: 159475 - DNA, 20 bp, Homo sapiens
  source 1..20: mol_type = genomic DNA
tggggatttttgagggcagt

SEQ ID NO: 159476 - DNA, 20 bp, Homo sapiens
  source 1..20: mol_type = genomic DNA
ggggatttttgagggcagtg

SEQ ID NO: 159477 - DNA, 20 bp, Homo sapiens
  source 1..20: mol_type = genomic DNA
gggatttttgagggcagtga

SEQ ID NO: 159478 - DNA, 20 bp, Homo sapiens
  source 1..20: mol_type = genomic DNA
ggatttttgagggcagtgat

SEQ ID NO: 159479 - DNA, 20 bp, Homo sapiens
  source 1..20: mol_type = genomic DNA
gatttttgagggcagtgatc

SEQ ID NO: 159480 - DNA, 20 bp, Homo sapiens
  source 1..20: mol_type = genomic DNA
atttttgagggcagtgatct

SEQ ID NO: 159481 - DNA, 20 bp, Homo sapiens
  source 1..20: mol_type = genomic DNA
tttttgagggcagtgatctt

SEQ ID NO: 159482 - DNA, 20 bp, Homo sapiens
  source 1..20: mol_type = genomic DNA
ttttgagggcagtgatctta

SEQ ID NO: 159483 - DNA, 20 bp, Homo sapiens
  source 1..20: mol_type = genomic DNA
tttgagggcagtgatcttaa

SEQ ID NO: 159484 - DNA, 20 bp, Homo sapiens
  source 1..20: mol_type = genomic DNA
ttgagggcagtgatcttaac

SEQ ID NO: 159485 - DNA, 20 bp, Homo sapiens
  source 1..20: mol_type = genomic DNA
tgagggcagtgatcttaact

SEQ ID NO: 159486 - DNA, 20 bp, Homo sapiens
  source 1..20: mol_type = genomic DNA
gagggcagtgatcttaactt

SEQ ID NO: 159487 - DNA, 20 bp, Homo sapiens
  source 1..20: mol_type = genomic DNA
agggcagtgatcttaacttt

SEQ ID NO: 159488 - DNA, 20 bp, Homo sapiens
  source 1..20: mol_type = genomic DNA
gggcagtgatcttaactttg

SEQ ID NO: 159489 - DNA, 20 bp, Homo sapiens
  source 1..20: mol_type = genomic DNA
ggcagtgatcttaactttgg

SEQ ID NO: 159490 - DNA, 20 bp, Homo sapiens
  source 1..20: mol_type = genomic DNA
gcagtgatcttaactttggg

SEQ ID NO: 159491 - DNA, 20 bp, Homo sapiens
  source 1..20: mol_type = genomic DNA
cagtgatcttaactttgggt

SEQ ID NO: 159492 - DNA, 20 bp, Homo sapiens
  source 1..20: mol_type = genomic DNA
agtgatcttaactttgggtg

SEQ ID NO: 159493 - DNA, 20 bp, Homo sapiens
  source 1..20: mol_type = genomic DNA
gtgatcttaactttgggtgc

SEQ ID NO: 159494 - DNA, 20 bp, Homo sapiens
  source 1..20: mol_type = genomic DNA
tgatcttaactttgggtgca

SEQ ID NO: 159495 - DNA, 20 bp, Homo sapiens
  source 1..20: mol_type = genomic DNA
gatcttaactttgggtgcac

SEQ ID NO: 159496 - DNA, 20 bp, Homo sapiens
  source 1..20: mol_type = genomic DNA
atcttaactttgggtgcaca

SEQ ID NO: 159497 - DNA, 20 bp, Homo sapiens
  source 1..20: mol_type = genomic DNA
tcttaactttgggtgcacag

SEQ ID NO: 159498 - DNA, 20 bp, Homo sapiens
  source 1..20: mol_type = genomic DNA
cttaactttgggtgcacagt

SEQ ID NO: 159499 - DNA, 20 bp, Homo sapiens
  source 1..20: mol_type = genomic DNA
ttaactttgggtgcacagtt

SEQ ID NO: 159500 - DNA, 20 bp, Homo sapiens
  source 1..20: mol_type = genomic DNA
taactttgggtgcacagtta

SEQ ID NO: 159501 - DNA, 20 bp, Homo sapiens
  source 1..20: mol_type = genomic DNA
aactttgggtgcacagttag

SEQ ID NO: 159502 - DNA, 20 bp, Homo sapiens
  source 1..20: mol_type = genomic DNA
actttgggtgcacagttagc

SEQ ID NO: 159503 - DNA, 20 bp, Homo sapiens
  source 1..20: mol_type = genomic DNA
ctttgggtgcacagttagct

SEQ ID NO: 159504 - DNA, 20 bp, Homo sapiens
  source 1..20: mol_type = genomic DNA
tttgggtgcacagttagctt

SEQ ID NO: 159505 - DNA, 20 bp, Homo sapiens
  source 1..20: mol_type = genomic DNA
ttgggtgcacagttagctta

SEQ ID NO: 159506 - DNA, 20 bp, Homo sapiens
  source 1..20: mol_type = genomic DNA
tgggtgcacagttagcttat

SEQ ID NO: 159507 - DNA, 20 bp, Homo sapiens
  source 1..20: mol_type = genomic DNA
gggtgcacagttagcttatt

SEQ ID NO: 159508 - DNA, 20 bp, Homo sapiens
  source 1..20: mol_type = genomic DNA
ggtgcacagttagcttattt

SEQ ID NO: 159509 - DNA, 20 bp, Homo sapiens
  source 1..20: mol_type = genomic DNA
gtgcacagttagcttatttg

SEQ ID NO: 159510 - DNA, 20 bp, Homo sapiens
  source 1..20: mol_type = genomic DNA
tgcacagttagcttatttga

SEQ ID NO: 159511 - DNA, 20 bp, Homo sapiens
  source 1..20: mol_type = genomic DNA
gcacagttagcttatttgaa

SEQ ID NO: 159512 - DNA, 20 bp, Homo sapiens
  source 1..20: mol_type = genomic DNA
cacagttagcttatttgaag

SEQ ID NO: 159513 - DNA, 20 bp, Homo sapiens
  source 1..20: mol_type = genomic DNA
acagttagcttatttgaaga

SEQ ID NO: 159514 - DNA, 20 bp, Homo sapiens
  source 1..20: mol_type = genomic DNA
cagttagcttatttgaagat

SEQ ID NO: 159515 - DNA, 20 bp, Homo sapiens
  source 1..20: mol_type = genomic DNA
agttagcttatttgaagatc

SEQ ID NO: 159516 - DNA, 20 bp, Homo sapiens
  source 1..20: mol_type = genomic DNA
gttagcttatttgaagatct

SEQ ID NO: 159517 - DNA, 20 bp, Homo sapiens
  source 1..20: mol_type = genomic DNA
ttagcttatttgaagatctt

SEQ ID NO: 159518 - DNA, 20 bp, Homo sapiens
  source 1..20: mol_type = genomic DNA
tagcttatttgaagatctta

SEQ ID NO: 159519 - DNA, 20 bp, Homo sapiens
  source 1..20: mol_type = genomic DNA
agcttatttgaagatcttac

SEQ ID NO: 159520 - DNA, 20 bp, Homo sapiens
  source 1..20: mol_type = genomic DNA
gcttatttgaagatcttact

SEQ ID NO: 159521 - DNA, 20 bp, Homo sapiens
  source 1..20: mol_type = genomic DNA
cttatttgaagatcttacta

SEQ ID NO: 159522 - DNA, 20 bp, Homo sapiens
  source 1..20: mol_type = genomic DNA
ttatttgaagatcttactaa

SEQ ID NO: 159523 - DNA, 20 bp, Homo sapiens
  source 1..20: mol_type = genomic DNA
tatttgaagatcttactaaa

SEQ ID NO: 159524 - DNA, 20 bp, Homo sapiens
  source 1..20: mol_type = genomic DNA
atttgaagatcttactaaaa

SEQ ID NO: 159525 - DNA, 20 bp, Homo sapiens
  source 1..20: mol_type = genomic DNA
tttgaagatcttactaaaaa

SEQ ID NO: 159526 - DNA, 20 bp, Homo sapiens
  source 1..20: mol_type = genomic DNA
ttgaagatcttactaaaaat

SEQ ID NO: 159527 - DNA, 20 bp, Homo sapiens
  source 1..20: mol_type = genomic DNA
tgaagatcttactaaaaata

SEQ ID NO: 159528 - DNA, 20 bp, Homo sapiens
  source 1..20: mol_type = genomic DNA
gaagatcttactaaaaatac

SEQ ID NO: 159529 - DNA, 20 bp, Homo sapiens
  source 1..20: mol_type = genomic DNA
aagatcttactaaaaataca

SEQ ID NO: 159530 - DNA, 20 bp, Homo sapiens
  source 1..20: mol_type = genomic DNA
agatcttactaaaaatacac

SEQ ID NO: 159531 - DNA, 20 bp, Homo sapiens
  source 1..20: mol_type = genomic DNA
gatcttactaaaaatacacc

SEQ ID NO: 159532 - DNA, 20 bp, Homo sapiens
  source 1..20: mol_type = genomic DNA
atcttactaaaaatacacca

SEQ ID NO: 159533 - DNA, 20 bp, Homo sapiens
  source 1..20: mol_type = genomic DNA
tcttactaaaaatacaccag

SEQ ID NO: 159534 - DNA, 20 bp, Homo sapiens
  source 1..20: mol_type = genomic DNA
cttactaaaaatacaccaga

SEQ ID NO: 159535 - DNA, 20 bp, Homo sapiens
  source 1..20: mol_type = genomic DNA
ttactaaaaatacaccagag

SEQ ID NO: 159536 - DNA, 20 bp, Homo sapiens
  source 1..20: mol_type = genomic DNA
tactaaaaatacaccagagc

SEQ ID NO: 159537 - DNA, 20 bp, Homo sapiens
  source 1..20: mol_type = genomic DNA
actaaaaatacaccagagcc

SEQ ID NO: 159538 - DNA, 20 bp, Homo sapiens
  source 1..20: mol_type = genomic DNA
ctaaaaatacaccagagccc

SEQ ID NO: 159539 - DNA, 20 bp, Homo sapiens
  source 1..20: mol_type = genomic DNA
taaaaatacaccagagccca

SEQ ID NO: 159540 - DNA, 20 bp, Homo sapiens
  source 1..20: mol_type = genomic DNA
aaaaatacaccagagcccaa

SEQ ID NO: 159541 - DNA, 20 bp, Homo sapiens
  source 1..20: mol_type = genomic DNA
aaaatacaccagagcccaac

SEQ ID NO: 159542 - DNA, 20 bp, Homo sapiens
  source 1..20: mol_type = genomic DNA
aaatacaccagagcccaacc

SEQ ID NO: 159543 - DNA, 20 bp, Homo sapiens
  source 1..20: mol_type = genomic DNA
aatacaccagagcccaacct

SEQ ID NO: 159544 - DNA, 20 bp, Homo sapiens
  source 1..20: mol_type = genomic DNA
atacaccagagcccaacctc

SEQ ID NO: 159545 - DNA, 20 bp, Homo sapiens
  source 1..20: mol_type = genomic DNA
tacaccagagcccaacctcc

SEQ ID NO: 159546 - DNA, 20 bp, Homo sapiens
  source 1..20: mol_type = genomic DNA
acaccagagcccaacctccg

SEQ ID NO: 159547 - DNA, 20 bp, Homo sapiens
  source 1..20: mol_type = genomic DNA
caccagagcccaacctccga

SEQ ID NO: 159548 - DNA, 20 bp, Homo sapiens
  source 1..20: mol_type = genomic DNA
accagagcccaacctccgac

SEQ ID NO: 159549 - DNA, 20 bp, Homo sapiens
  source 1..20: mol_type = genomic DNA
ccagagcccaacctccgacc

SEQ ID NO: 159550 - DNA, 20 bp, Homo sapiens
  source 1..20: mol_type = genomic DNA
cagagcccaacctccgacca

SEQ ID NO: 159551 - DNA, 20 bp, Homo sapiens
  source 1..20: mol_type = genomic DNA
agagcccaacctccgaccaa

SEQ ID NO: 159552 - DNA, 20 bp, Homo sapiens
  source 1..20: mol_type = genomic DNA
gagcccaacctccgaccaat

SEQ ID NO: 159553 - DNA, 20 bp, Homo sapiens
  source 1..20: mol_type = genomic DNA
agcccaacctccgaccaatt

SEQ ID NO: 159554 - DNA, 20 bp, Homo sapiens
  source 1..20: mol_type = genomic DNA
gcccaacctccgaccaatta

SEQ ID NO: 159555 - DNA, 20 bp, Homo sapiens
  source 1..20: mol_type = genomic DNA
cccaacctccgaccaattac

SEQ ID NO: 159556 - DNA, 20 bp, Homo sapiens
  source 1..20: mol_type = genomic DNA
ccaacctccgaccaattaca

SEQ ID NO: 159557 - DNA, 20 bp, Homo sapiens
  source 1..20: mol_type = genomic DNA
caacctccgaccaattacat

SEQ ID NO: 159558 - DNA, 20 bp, Homo sapiens
  source 1..20: mol_type = genomic DNA
aacctccgaccaattacatc

SEQ ID NO: 159559 - DNA, 20 bp, Homo sapiens
  source 1..20: mol_type = genomic DNA
acctccgaccaattacatca

SEQ ID NO: 159560 - DNA, 20 bp, Homo sapiens
  source 1..20: mol_type = genomic DNA
cctccgaccaattacatcaa

SEQ ID NO: 159561 - DNA, 20 bp, Homo sapiens
  source 1..20: mol_type = genomic DNA
ctccgaccaattacatcaaa

SEQ ID NO: 159562 - DNA, 20 bp, Homo sapiens
  source 1..20: mol_type = genomic DNA
tccgaccaattacatcaaaa

SEQ ID NO: 159563 - DNA, 20 bp, Homo sapiens
  source 1..20: mol_type = genomic DNA
ccgaccaattacatcaaaac

SEQ ID NO: 159564 - DNA, 20 bp, Homo sapiens
  source 1..20: mol_type = genomic DNA
cgaccaattacatcaaaacc

SEQ ID NO: 159565 - DNA, 20 bp, Homo sapiens
  source 1..20: mol_type = genomic DNA
gaccaattacatcaaaacct

SEQ ID NO: 159566 - DNA, 20 bp, Homo sapiens
  source 1..20: mol_type = genomic DNA
accaattacatcaaaacctg

SEQ ID NO: 159567 - DNA, 20 bp, Homo sapiens
  source 1..20: mol_type = genomic DNA
ccaattacatcaaaacctgt

SEQ ID NO: 159568 - DNA, 20 bp, Homo sapiens
  source 1..20: mol_type = genomic DNA
caattacatcaaaacctgtc

SEQ ID NO: 159569 - DNA, 20 bp, Homo sapiens
  source 1..20: mol_type = genomic DNA
aattacatcaaaacctgtcc

SEQ ID NO: 159570 - DNA, 20 bp, Homo sapiens
  source 1..20: mol_type = genomic DNA
attacatcaaaacctgtcct

SEQ ID NO: 159571 - DNA, 20 bp, Homo sapiens
  source 1..20: mol_type = genomic DNA
ttacatcaaaacctgtccta

SEQ ID NO: 159572 - DNA, 20 bp, Homo sapiens
  source 1..20: mol_type = genomic DNA
tacatcaaaacctgtcctag

SEQ ID NO: 159573 - DNA, 20 bp, Homo sapiens
  source 1..20: mol_type = genomic DNA
acatcaaaacctgtcctagt

SEQ ID NO: 159574 - DNA, 20 bp, Homo sapiens
  source 1..20: mol_type = genomic DNA
catcaaaacctgtcctagtg

SEQ ID NO: 159575 - DNA, 20 bp, Homo sapiens
  source 1..20: mol_type = genomic DNA
atcaaaacctgtcctagtgc

SEQ ID NO: 159576 - DNA, 20 bp, Homo sapiens
  source 1..20: mol_type = genomic DNA
tcaaaacctgtcctagtgca

SEQ ID NO: 159577 - DNA, 20 bp, Homo sapiens
  source 1..20: mol_type = genomic DNA
caaaacctgtcctagtgcag

SEQ ID NO: 159578 - DNA, 20 bp, Homo sapiens
  source 1..20: mol_type = genomic DNA
aaaacctgtcctagtgcagg

SEQ ID NO: 159579 - DNA, 20 bp, Homo sapiens
  source 1..20: mol_type = genomic DNA
aaacctgtcctagtgcaggg

SEQ ID NO: 159580 - DNA, 20 bp, Homo sapiens
  source 1..20: mol_type = genomic DNA
aacctgtcctagtgcagggt

SEQ ID NO: 159581 - DNA, 20 bp, Homo sapiens
  source 1..20: mol_type = genomic DNA
acctgtcctagtgcagggtg

SEQ ID NO: 159582 - DNA, 20 bp, Homo sapiens
  source 1..20: mol_type = genomic DNA
cctgtcctagtgcagggtga

SEQ ID NO: 159583 - DNA, 20 bp, Homo sapiens
  source 1..20: mol_type = genomic DNA
ctgtcctagtgcagggtgag

SEQ ID NO: 159584 - DNA, 20 bp, Homo sapiens
  source 1..20: mol_type = genomic DNA
tgtcctagtgcagggtgagt

SEQ ID NO: 159585 - DNA, 20 bp, Homo sapiens
  source 1..20: mol_type = genomic DNA
gtcctagtgcagggtgagta

SEQ ID NO: 159586 - DNA, 20 bp, Homo sapiens
  source 1..20: mol_type = genomic DNA
tcctagtgcagggtgagtat

SEQ ID NO: 159587 - DNA, 20 bp, Homo sapiens
  source 1..20: mol_type = genomic DNA
cctagtgcagggtgagtatt

SEQ ID NO: 159588 - DNA, 20 bp, Homo sapiens
  source 1..20: mol_type = genomic DNA
ctagtgcagggtgagtattg

SEQ ID NO: 159589 - DNA, 20 bp, Homo sapiens
  source 1..20: mol_type = genomic DNA
tagtgcagggtgagtattgc

SEQ ID NO: 159590 - DNA, 20 bp, Homo sapiens
  source 1..20: mol_type = genomic DNA
agtgcagggtgagtattgct

SEQ ID NO: 159591 - DNA, 20 bp, Homo sapiens
  source 1..20: mol_type = genomic DNA
gtgcagggtgagtattgctg

SEQ ID NO: 159592 - DNA, 20 bp, Homo sapiens
  source 1..20: mol_type = genomic DNA
tgcagggtgagtattgctgt

SEQ ID NO: 159593 - DNA, 20 bp, Homo sapiens
  source 1..20: mol_type = genomic DNA
gcagggtgagtattgctgtt

SEQ ID NO: 159594 - DNA, 20 bp, Homo sapiens
  source 1..20: mol_type = genomic DNA
cagggtgagtattgctgttt

SEQ ID NO: 159595 - DNA, 20 bp, Homo sapiens
  source 1..20: mol_type = genomic DNA
agggtgagtattgctgtttt

SEQ ID NO: 159596 - DNA, 20 bp, Homo sapiens
  source 1..20: mol_type = genomic DNA
gggtgagtattgctgttttt

SEQ ID NO: 159597 - DNA, 20 bp, Homo sapiens
  source 1..20: mol_type = genomic DNA
ggtgagtattgctgtttttt

SEQ ID NO: 159598 - DNA, 20 bp, Homo sapiens
  source 1..20: mol_type = genomic DNA
gtgagtattgctgttttttg

SEQ ID NO: 159599 - DNA, 20 bp, Homo sapiens
  source 1..20: mol_type = genomic DNA
tgagtattgctgttttttga

SEQ ID NO: 159600 - DNA, 20 bp, Homo sapiens
  source 1..20: mol_type = genomic DNA
gagtattgctgttttttgaa

SEQ ID NO: 159601 - DNA, 20 bp, Homo sapiens
  source 1..20: mol_type = genomic DNA
agtattgctgttttttgaaa

SEQ ID NO: 159602 - DNA, 20 bp, Homo sapiens
  source 1..20: mol_type = genomic DNA
gtattgctgttttttgaaag

SEQ ID NO: 159603 - DNA, 20 bp, Homo sapiens
  source 1..20: mol_type = genomic DNA
tattgctgttttttgaaagt

SEQ ID NO: 159604 - DNA, 20 bp, Homo sapiens
  source 1..20: mol_type = genomic DNA
attgctgttttttgaaagtt

SEQ ID NO: 159605 - DNA, 20 bp, Homo sapiens
  source 1..20: mol_type = genomic DNA
ttgctgttttttgaaagttt

SEQ ID NO: 159606 - DNA, 20 bp, Homo sapiens
  source 1..20: mol_type = genomic DNA
tgctgttttttgaaagtttc

SEQ ID NO: 159607 - DNA, 20 bp, Homo sapiens
  source 1..20: mol_type = genomic DNA
gctgttttttgaaagtttcc

SEQ ID NO: 159608 - DNA, 20 bp, Homo sapiens
  source 1..20: mol_type = genomic DNA
ctgttttttgaaagtttcca

SEQ ID NO: 159609 - DNA, 20 bp, Homo sapiens
  source 1..20: mol_type = genomic DNA
tgttttttgaaagtttccaa

SEQ ID NO: 159610 - DNA, 20 bp, Homo sapiens
  source 1..20: mol_type = genomic DNA
gttttttgaaagtttccaaa

SEQ ID NO: 159611 - DNA, 20 bp, Homo sapiens
  source 1..20: mol_type = genomic DNA
ttttttgaaagtttccaaaa

SEQ ID NO: 159612 - DNA, 20 bp, Homo sapiens
  source 1..20: mol_type = genomic DNA
tttttgaaagtttccaaaag

SEQ ID NO: 159613 - DNA, 20 bp, Homo sapiens
  source 1..20: mol_type = genomic DNA
ttttgaaagtttccaaaagt

SEQ ID NO: 159614 - DNA, 20 bp, Homo sapiens
  source 1..20: mol_type = genomic DNA
tttgaaagtttccaaaagtg

SEQ ID NO: 159615 - DNA, 20 bp, Homo sapiens
  source 1..20: mol_type = genomic DNA
ttgaaagtttccaaaagtga

SEQ ID NO: 159616 - DNA, 20 bp, Homo sapiens
  source 1..20: mol_type = genomic DNA
tgaaagtttccaaaagtgat

SEQ ID NO: 159617 - DNA, 20 bp, Homo sapiens
  source 1..20: mol_type = genomic DNA
gaaagtttccaaaagtgatt

SEQ ID NO: 159618 - DNA, 20 bp, Homo sapiens
  source 1..20: mol_type = genomic DNA
aaagtttccaaaagtgattt

SEQ ID NO: 159619 - DNA, 20 bp, Homo sapiens
  source 1..20: mol_type = genomic DNA
aagtttccaaaagtgatttt

SEQ ID NO: 159620 - DNA, 20 bp, Homo sapiens
  source 1..20: mol_type = genomic DNA
agtttccaaaagtgattttg

SEQ ID NO: 159621 - DNA, 20 bp, Homo sapiens
  source 1..20: mol_type = genomic DNA
gtttccaaaagtgattttga

SEQ ID NO: 159622 - DNA, 20 bp, Homo sapiens
  source 1..20: mol_type = genomic DNA
tttccaaaagtgattttgat

SEQ ID NO: 159623 - DNA, 20 bp, Homo sapiens
  source 1..20: mol_type = genomic DNA
ttccaaaagtgattttgatg

SEQ ID NO: 159624 - DNA, 20 bp, Homo sapiens
  source 1..20: mol_type = genomic DNA
tccaaaagtgattttgatgt

SEQ ID NO: 159625 - DNA, 20 bp, Homo sapiens
  source 1..20: mol_type = genomic DNA
ccaaaagtgattttgatgtg

SEQ ID NO: 159626 - DNA, 20 bp, Homo sapiens
  source 1..20: mol_type = genomic DNA
caaaagtgattttgatgtgc

SEQ ID NO: 159627 - DNA, 20 bp, Homo sapiens
  source 1..20: mol_type = genomic DNA
aaaagtgattttgatgtgca

SEQ ID NO: 159628 - DNA, 20 bp, Homo sapiens
  source 1..20: mol_type = genomic DNA
aaagtgattttgatgtgcac

SEQ ID NO: 159629 - DNA, 20 bp, Homo sapiens
  source 1..20: mol_type = genomic DNA
aagtgattttgatgtgcacc

SEQ ID NO: 159630 - DNA, 20 bp, Homo sapiens
  source 1..20: mol_type = genomic DNA
agtgattttgatgtgcacct

SEQ ID NO: 159631 - DNA, 20 bp, Homo sapiens
  source 1..20: mol_type = genomic DNA
gtgattttgatgtgcaccta

SEQ ID NO: 159632 - DNA, 20 bp, Homo sapiens
  source 1..20: mol_type = genomic DNA
tgattttgatgtgcacctac

SEQ ID NO: 159633 - DNA, 20 bp, Homo sapiens
  source 1..20: mol_type = genomic DNA
gattttgatgtgcacctacg

SEQ ID NO: 159634 - DNA, 20 bp, Homo sapiens
  source 1..20: mol_type = genomic DNA
attttgatgtgcacctacga

SEQ ID NO: 159635 - DNA, 20 bp, Homo sapiens
  source 1..20: mol_type = genomic DNA
ttttgatgtgcacctacgat

SEQ ID NO: 159636 - DNA, 20 bp, Homo sapiens
  source 1..20: mol_type = genomic DNA
tttgatgtgcacctacgatt

SEQ ID NO: 159637 - DNA, 20 bp, Homo sapiens
  source 1..20: mol_type = genomic DNA
ttgatgtgcacctacgattg

SEQ ID NO: 159638 - DNA, 20 bp, Homo sapiens
  source 1..20: mol_type = genomic DNA
tgatgtgcacctacgattga

SEQ ID NO: 159639 - DNA, 20 bp, Homo sapiens
  source 1..20: mol_type = genomic DNA
gatgtgcacctacgattgag

SEQ ID NO: 159640 - DNA, 20 bp, Homo sapiens
  source 1..20: mol_type = genomic DNA
atgtgcacctacgattgaga

SEQ ID NO: 159641 - DNA, 20 bp, Homo sapiens
  source 1..20: mol_type = genomic DNA
tgtgcacctacgattgagaa

SEQ ID NO: 159642 - DNA, 20 bp, Homo sapiens
  source 1..20: mol_type = genomic DNA
gtgcacctacgattgagaac

SEQ ID NO: 159643 - DNA, 20 bp, Homo sapiens
  source 1..20: mol_type = genomic DNA
tgcacctacgattgagaact

SEQ ID NO: 159644 - DNA, 20 bp, Homo sapiens
  source 1..20: mol_type = genomic DNA
gcacctacgattgagaactg

SEQ ID NO: 159645 - DNA, 20 bp, Homo sapiens
  source 1..20: mol_type = genomic DNA
cacctacgattgagaactgt

SEQ ID NO: 159646 - DNA, 20 bp, Homo sapiens
  source 1..20: mol_type = genomic DNA
acctacgattgagaactgtc

SEQ ID NO: 159647 - DNA, 20 bp, Homo sapiens
  source 1..20: mol_type = genomic DNA
cctacgattgagaactgtcg

SEQ ID NO: 159648 - DNA, 20 bp, Homo sapiens
  source 1..20: mol_type = genomic DNA
ctacgattgagaactgtcgt

SEQ ID NO: 159649 - DNA, 20 bp, Homo sapiens
  source 1..20: mol_type = genomic DNA
tacgattgagaactgtcgtt

SEQ ID NO: 159650 - DNA, 20 bp, Homo sapiens
  source 1..20: mol_type = genomic DNA
acgattgagaactgtcgttt

SEQ ID NO: 159651 - DNA, 20 bp, Homo sapiens
  source 1..20: mol_type = genomic DNA
cgattgagaactgtcgtttg

SEQ ID NO: 159652 - DNA, 20 bp, Homo sapiens
  source 1..20: mol_type = genomic DNA
gattgagaactgtcgtttga

SEQ ID NO: 159653 - DNA, 20 bp, Homo sapiens
  source 1..20: mol_type = genomic DNA
attgagaactgtcgtttgag

SEQ ID NO: 159654 - DNA, 20 bp, Homo sapiens
  source 1..20: mol_type = genomic DNA
ttgagaactgtcgtttgagg

SEQ ID NO: 159655 - DNA, 20 bp, Homo sapiens
  source 1..20: mol_type = genomic DNA
tgagaactgtcgtttgagga

SEQ ID NO: 159656 - DNA, 20 bp, Homo sapiens
  source 1..20: mol_type = genomic DNA
gagaactgtcgtttgaggac

SEQ ID NO: 159657 - DNA, 20 bp, Homo sapiens
  source 1..20: mol_type = genomic DNA
agaactgtcgtttgaggaca

SEQ ID NO: 159658 - DNA, 20 bp, Homo sapiens
  source 1..20: mol_type = genomic DNA
gaactgtcgtttgaggacag

SEQ ID NO: 159659 - DNA, 20 bp, Homo sapiens
  source 1..20: mol_type = genomic DNA
aactgtcgtttgaggacagt

SEQ ID NO: 159660 - DNA, 20 bp, Homo sapiens
  source 1..20: mol_type = genomic DNA
actgtcgtttgaggacagtg

SEQ ID NO: 159661 - DNA, 20 bp, Homo sapiens
  source 1..20: mol_type = genomic DNA
ctgtcgtttgaggacagtgg

SEQ ID NO: 159662 - DNA, 20 bp, Homo sapiens
  source 1..20: mol_type = genomic DNA
tgtcgtttgaggacagtggg

SEQ ID NO: 159663 - DNA, 20 bp, Homo sapiens
  source 1..20: mol_type = genomic DNA
gtcgtttgaggacagtgggt

SEQ ID NO: 159664 - DNA, 20 bp, Homo sapiens
  source 1..20: mol_type = genomic DNA
tcgtttgaggacagtgggtg

SEQ ID NO: 159665 - DNA, 20 bp, Homo sapiens
  source 1..20: mol_type = genomic DNA
cgtttgaggacagtgggtgg

SEQ ID NO: 159666 - DNA, 20 bp, Homo sapiens
  source 1..20: mol_type = genomic DNA
gtttgaggacagtgggtgga

SEQ ID NO: 159667 - DNA, 20 bp, Homo sapiens
  source 1..20: mol_type = genomic DNA
tttgaggacagtgggtggag

SEQ ID NO: 159668 - DNA, 20 bp, Homo sapiens
  source 1..20: mol_type = genomic DNA
ttgaggacagtgggtggagt

SEQ ID NO: 159669 - DNA, 20 bp, Homo sapiens
  source 1..20: mol_type = genomic DNA
tgaggacagtgggtggagtt

SEQ ID NO: 159670 - DNA, 20 bp, Homo sapiens
  source 1..20: mol_type = genomic DNA
gaggacagtgggtggagttt

SEQ ID NO: 159671 - DNA, 20 bp, Homo sapiens
  source 1..20: mol_type = genomic DNA
aggacagtgggtggagtttc

SEQ ID NO: 159672 - DNA, 20 bp, Homo sapiens
  source 1..20: mol_type = genomic DNA
ggacagtgggtggagtttcg

SEQ ID NO: 159673 - DNA, 20 bp, Homo sapiens
  source 1..20: mol_type = genomic DNA
gacagtgggtggagtttcgt

SEQ ID NO: 159674 - DNA, 20 bp, Homo sapiens
  source 1..20: mol_type = genomic DNA
acagtgggtggagtttcgta

SEQ ID NO: 159675 - DNA, 20 bp, Homo sapiens
  source 1..20: mol_type = genomic DNA
cagtgggtggagtttcgtat

SEQ ID NO: 159676 - DNA, 20 bp, Homo sapiens
  source 1..20: mol_type = genomic DNA
agtgggtggagtttcgtatt

SEQ ID NO: 159677 - DNA, 20 bp, Homo sapiens
  source 1..20: mol_type = genomic DNA
gtgggtggagtttcgtattt

SEQ ID NO: 159678 - DNA, 20 bp, Homo sapiens
  source 1..20: mol_type = genomic DNA
tgggtggagtttcgtatttg

SEQ ID NO: 159679 - DNA, 20 bp, Homo sapiens
  source 1..20: mol_type = genomic DNA
gggtggagtttcgtatttgg

SEQ ID NO: 159680 - DNA, 20 bp, Homo sapiens
  source 1..20: mol_type = genomic DNA
ggtggagtttcgtatttgga

SEQ ID NO: 159681 - DNA, 20 bp, Homo sapiens
  source 1..20: mol_type = genomic DNA
gtggagtttcgtatttggaa

SEQ ID NO: 159682 - DNA, 20 bp, Homo sapiens
  source 1..20: mol_type = genomic DNA
tggagtttcgtatttggaaa

SEQ ID NO: 159683 - DNA, 20 bp, Homo sapiens
  source 1..20: mol_type = genomic DNA
ggagtttcgtatttggaaat

SEQ ID NO: 159684 - DNA, 20 bp, Homo sapiens
  source 1..20: mol_type = genomic DNA
gagtttcgtatttggaaatt

SEQ ID NO: 159685 - DNA, 20 bp, Homo sapiens
  source 1..20: mol_type = genomic DNA
agtttcgtatttggaaatta

SEQ ID NO: 159686 - DNA, 20 bp, Homo sapiens
  source 1..20: mol_type = genomic DNA
gtttcgtatttggaaattag

SEQ ID NO: 159687 - DNA, 20 bp, Homo sapiens
  source 1..20: mol_type = genomic DNA
tttcgtatttggaaattaga

SEQ ID NO: 159688 - DNA, 20 bp, Homo sapiens
  source 1..20: mol_type = genomic DNA
ttcgtatttggaaattagaa

SEQ ID NO: 159689 - DNA, 20 bp, Homo sapiens
  source 1..20: mol_type = genomic DNA
tcgtatttggaaattagaag

SEQ ID NO: 159690 - DNA, 20 bp, Homo sapiens
  source 1..20: mol_type = genomic DNA
cgtatttggaaattagaaga

SEQ ID NO: 159691 - DNA, 20 bp, Homo sapiens
  source 1..20: mol_type = genomic DNA
gtatttggaaattagaagac

SEQ ID NO: 159692 - DNA, 20 bp, Homo sapiens
  source 1..20: mol_type = genomic DNA
tatttggaaattagaagacc

SEQ ID NO: 159693 - DNA, 20 bp, Homo sapiens
  source 1..20: mol_type = genomic DNA
atttggaaattagaagacct

SEQ ID NO: 159694 - DNA, 20 bp, Homo sapiens
  source 1..20: mol_type = genomic DNA
tttggaaattagaagacctg

SEQ ID NO: 159695 - DNA, 20 bp, Homo sapiens
  source 1..20: mol_type = genomic DNA
ttggaaattagaagacctgg

SEQ ID NO: 159696 - DNA, 20 bp, Homo sapiens
  source 1..20: mol_type = genomic DNA
tggaaattagaagacctgga

SEQ ID NO: 159697 - DNA, 20 bp, Homo sapiens
  source 1..20: mol_type = genomic DNA
ggaaattagaagacctggag

SEQ ID NO: 159698 - DNA, 20 bp, Homo sapiens
  source 1..20: mol_type = genomic DNA
gaaattagaagacctggagt

SEQ ID NO: 159699 - DNA, 20 bp, Homo sapiens
  source 1..20: mol_type = genomic DNA
aaattagaagacctggagtt

SEQ ID NO: 159700 - DNA, 20 bp, Homo sapiens
  source 1..20: mol_type = genomic DNA
aattagaagacctggagttt

SEQ ID NO: 159701 - DNA, 20 bp, Homo sapiens
  source 1..20: mol_type = genomic DNA
attagaagacctggagtttc

SEQ ID NO: 159702 - DNA, 20 bp, Homo sapiens
  source 1..20: mol_type = genomic DNA
ttagaagacctggagtttcc

SEQ ID NO: 159703 - DNA, 20 bp, Homo sapiens
  source 1..20: mol_type = genomic DNA
tagaagacctggagtttcca

SEQ ID NO: 159704 - DNA, 20 bp, Homo sapiens
  source 1..20: mol_type = genomic DNA
agaagacctggagtttccat

SEQ ID NO: 159705 - DNA, 20 bp, Homo sapiens
  source 1..20: mol_type = genomic DNA
gaagacctggagtttccatt

SEQ ID NO: 159706 - DNA, 20 bp, Homo sapiens
  source 1..20: mol_type = genomic DNA
aagacctggagtttccatta

SEQ ID NO: 159707 - DNA, 20 bp, Homo sapiens
  source 1..20: mol_type = genomic DNA
agacctggagtttccattac

SEQ ID NO: 159708 - DNA, 20 bp, Homo sapiens
  source 1..20: mol_type = genomic DNA
gacctggagtttccattaca

SEQ ID NO: 159709 - DNA, 20 bp, Homo sapiens
  source 1..20: mol_type = genomic DNA
acctggagtttccattacac

SEQ ID NO: 159710 - DNA, 20 bp, Homo sapiens
  source 1..20: mol_type = genomic DNA
cctggagtttccattacacc

SEQ ID NO: 159711 - DNA, 20 bp, Homo sapiens
  source 1..20: mol_type = genomic DNA
ctggagtttccattacaccg

SEQ ID NO: 159712 - DNA, 20 bp, Homo sapiens
  source 1..20: mol_type = genomic DNA
tggagtttccattacaccga

SEQ ID NO: 159713 - DNA, 20 bp, Homo sapiens
  source 1..20: mol_type = genomic DNA
ggagtttccattacaccgaa

SEQ ID NO: 159714 - DNA, 20 bp, Homo sapiens
  source 1..20: mol_type = genomic DNA
gagtttccattacaccgaat

SEQ ID NO: 159715 - DNA, 20 bp, Homo sapiens
  source 1..20: mol_type = genomic DNA
agtttccattacaccgaatt

SEQ ID NO: 159716 - DNA, 20 bp, Homo sapiens
  source 1..20: mol_type = genomic DNA
gtttccattacaccgaattg

SEQ ID NO: 159717 - DNA, 20 bp, Homo sapiens
  source 1..20: mol_type = genomic DNA
tttccattacaccgaattgg

SEQ ID NO: 159718 - DNA, 20 bp, Homo sapiens
  source 1..20: mol_type = genomic DNA
ttccattacaccgaattggc

SEQ ID NO: 159719 - DNA, 20 bp, Homo sapiens
  source 1..20: mol_type = genomic DNA
tccattacaccgaattggca

SEQ ID NO: 159720 - DNA, 20 bp, Homo sapiens
  source 1..20: mol_type = genomic DNA
ccattacaccgaattggcac

SEQ ID NO: 159721 - DNA, 20 bp, Homo sapiens
  source 1..20: mol_type = genomic DNA
cattacaccgaattggcact

SEQ ID NO: 159722 - DNA, 20 bp, Homo sapiens
  source 1..20: mol_type = genomic DNA
attacaccgaattggcactt

SEQ ID NO: 159723 - DNA, 20 bp, Homo sapiens
  source 1..20: mol_type = genomic DNA
ttacaccgaattggcactta

SEQ ID NO: 159724 - DNA, 20 bp, Homo sapiens
  source 1..20: mol_type = genomic DNA
tacaccgaattggcacttaa

SEQ ID NO: 159725 - DNA, 20 bp, Homo sapiens
  source 1..20: mol_type = genomic DNA
acaccgaattggcacttaat

SEQ ID NO: 159726 - DNA, 20 bp, Homo sapiens
  source 1..20: mol_type = genomic DNA
caccgaattggcacttaata

SEQ ID NO: 159727 - DNA, 20 bp, Homo sapiens
  source 1..20: mol_type = genomic DNA
accgaattggcacttaataa

SEQ ID NO: 159728 - DNA, 20 bp, Homo sapiens
  source 1..20: mol_type = genomic DNA
ccgaattggcacttaataac

SEQ ID NO: 159729 - DNA, 20 bp, Homo sapiens
  source 1..20: mol_type = genomic DNA
cgaattggcacttaataact

SEQ ID NO: 159730 - DNA, 20 bp, Homo sapiens
  source 1..20: mol_type = genomic DNA
gaattggcacttaataactg

SEQ ID NO: 159731 - DNA, 20 bp, Homo sapiens
  source 1..20: mol_type = genomic DNA
aattggcacttaataactgt

SEQ ID NO: 159732 - DNA, 20 bp, Homo sapiens
  source 1..20: mol_type = genomic DNA
attggcacttaataactgtt

SEQ ID NO: 159733 - DNA, 20 bp, Homo sapiens
  source 1..20: mol_type = genomic DNA
ttggcacttaataactgttg

SEQ ID NO: 159734 - DNA, 20 bp, Homo sapiens
  source 1..20: mol_type = genomic DNA
tggcacttaataactgttgt

SEQ ID NO: 159735 - DNA, 20 bp, Homo sapiens
  source 1..20: mol_type = genomic DNA
ggcacttaataactgttgtc

SEQ ID NO: 159736 - DNA, 20 bp, Homo sapiens
  source 1..20: mol_type = genomic DNA
gcacttaataactgttgtcg

SEQ ID NO: 159737 - DNA, 20 bp, Homo sapiens
  source 1..20: mol_type = genomic DNA
cacttaataactgttgtcgg

SEQ ID NO: 159738 - DNA, 20 bp, Homo sapiens
  source 1..20: mol_type = genomic DNA
acttaataactgttgtcgga

SEQ ID NO: 159739 - DNA, 20 bp, Homo sapiens
  source 1..20: mol_type = genomic DNA
cttaataactgttgtcggag

SEQ ID NO: 159740 - DNA, 20 bp, Homo sapiens
  source 1..20: mol_type = genomic DNA
ttaataactgttgtcggagc

SEQ ID NO: 159741 - DNA, 20 bp, Homo sapiens
  source 1..20: mol_type = genomic DNA
taataactgttgtcggagca

SEQ ID NO: 159742 - DNA, 20 bp, Homo sapiens
  source 1..20: mol_type = genomic DNA
aataactgttgtcggagcat

SEQ ID NO: 159743 - DNA, 20 bp, Homo sapiens
  source 1..20: mol_type = genomic DNA
ataactgttgtcggagcatt

SEQ ID NO: 159744 - DNA, 20 bp, Homo sapiens
  source 1..20: mol_type = genomic DNA
taactgttgtcggagcattt

SEQ ID NO: 159745 - DNA, 20 bp, Homo sapiens
  source 1..20: mol_type = genomic DNA
aactgttgtcggagcatttc

SEQ ID NO: 159746 - DNA, 20 bp, Homo sapiens
  source 1..20: mol_type = genomic DNA
actgttgtcggagcatttct

SEQ ID NO: 159747 - DNA, 20 bp, Homo sapiens
  source 1..20: mol_type = genomic DNA
ctgttgtcggagcatttctt

SEQ ID NO: 159748 - DNA, 20 bp, Homo sapiens
  source 1..20: mol_type = genomic DNA
tgttgtcggagcatttctta

SEQ ID NO: 159749 - DNA, 20 bp, Homo sapiens
  source 1..20: mol_type = genomic DNA
gttgtcggagcatttcttaa

SEQ ID NO: 159750 - DNA, 20 bp, Homo sapiens
  source 1..20: mol_type = genomic DNA
ttgtcggagcatttcttaag

SEQ ID NO: 159751 - DNA, 20 bp, Homo sapiens
  source 1..20: mol_type = genomic DNA
tgtcggagcatttcttaagc

SEQ ID NO: 159752 - DNA, 20 bp, Homo sapiens
  source 1..20: mol_type = genomic DNA
gtcggagcatttcttaagcc

SEQ ID NO: 159753 - DNA, 20 bp, Homo sapiens
  source 1..20: mol_type = genomic DNA
tcggagcatttcttaagcca

SEQ ID NO: 159754 - DNA, 20 bp, Homo sapiens
  source 1..20: mol_type = genomic DNA
cggagcatttcttaagccac

SEQ ID NO: 159755 - DNA, 20 bp, Homo sapiens
  source 1..20: mol_type = genomic DNA
ggagcatttcttaagccaca

SEQ ID NO: 159756 - DNA, 20 bp, Homo sapiens
  source 1..20: mol_type = genomic DNA
gagcatttcttaagccacat

SEQ ID NO: 159757 - DNA, 20 bp, Homo sapiens
  source 1..20: mol_type = genomic DNA
agcatttcttaagccacatt

SEQ ID NO: 159758 - DNA, 20 bp, Homo sapiens
  source 1..20: mol_type = genomic DNA
gcatttcttaagccacattt

SEQ ID NO: 159759 - DNA, 20 bp, Homo sapiens
  source 1..20: mol_type = genomic DNA
catttcttaagccacatttt

SEQ ID NO: 159760 - DNA, 20 bp, Homo sapiens
  source 1..20: mol_type = genomic DNA
atttcttaagccacattttc

SEQ ID NO: 159761 - DNA, 20 bp, Homo sapiens
  source 1..20: mol_type = genomic DNA
tttcttaagccacattttcg

SEQ ID NO: 159762 - DNA, 20 bp, Homo sapiens
  source 1..20: mol_type = genomic DNA
ttcttaagccacattttcgt

SEQ ID NO: 159763 - DNA, 20 bp, Homo sapiens
  source 1..20: mol_type = genomic DNA
tcttaagccacattttcgta

SEQ ID NO: 159764 - DNA, 20 bp, Homo sapiens
  source 1..20: mol_type = genomic DNA
cttaagccacattttcgtaa

SEQ ID NO: 159765 - DNA, 20 bp, Homo sapiens
  source 1..20: mol_type = genomic DNA
ttaagccacattttcgtaaa

SEQ ID NO: 159766 - DNA, 20 bp, Homo sapiens
  source 1..20: mol_type = genomic DNA
taagccacattttcgtaaag

SEQ ID NO: 159767 - DNA, 20 bp, Homo sapiens
  source 1..20: mol_type = genomic DNA
aagccacattttcgtaaagt

SEQ ID NO: 159768 - DNA, 20 bp, Homo sapiens
  source 1..20: mol_type = genomic DNA
agccacattttcgtaaagtg

SEQ ID NO: 159769 - DNA, 20 bp, Homo sapiens
  source 1..20: mol_type = genomic DNA
gccacattttcgtaaagtgg

SEQ ID NO: 159770 - DNA, 20 bp, Homo sapiens
  source 1..20: mol_type = genomic DNA
ccacattttcgtaaagtggc

SEQ ID NO: 159771 - DNA, 20 bp, Homo sapiens
  source 1..20: mol_type = genomic DNA
cacattttcgtaaagtggct

SEQ ID NO: 159772 - DNA, 20 bp, Homo sapiens
  source 1..20: mol_type = genomic DNA
acattttcgtaaagtggctt

SEQ ID NO: 159773 - DNA, 20 bp, Homo sapiens
  source 1..20: mol_type = genomic DNA
cattttcgtaaagtggcttt

SEQ ID NO: 159774 - DNA, 20 bp, Homo sapiens
  source 1..20: mol_type = genomic DNA
attttcgtaaagtggcttta

SEQ ID NO: 159775 - DNA, 20 bp, Homo sapiens
  source 1..20: mol_type = genomic DNA
ttttcgtaaagtggctttaa

SEQ ID NO: 159776 - DNA, 20 bp, Homo sapiens
  source 1..20: mol_type = genomic DNA
tttcgtaaagtggctttaaa

SEQ ID NO: 159777 - DNA, 20 bp, Homo sapiens
  source 1..20: mol_type = genomic DNA
ttcgtaaagtggctttaaaa

SEQ ID NO: 159778 - DNA, 20 bp, Homo sapiens
  source 1..20: mol_type = genomic DNA
tcgtaaagtggctttaaaat

SEQ ID NO: 159779 - DNA, 20 bp, Homo sapiens
  source 1..20: mol_type = genomic DNA
cgtaaagtggctttaaaatt

SEQ ID NO: 159780 - DNA, 20 bp, Homo sapiens
  source 1..20: mol_type = genomic DNA
gtaaagtggctttaaaattg

SEQ ID NO: 159781 - DNA, 20 bp, Homo sapiens
  source 1..20: mol_type = genomic DNA
taaagtggctttaaaattgc

SEQ ID NO: 159782 - DNA, 20 bp, Homo sapiens
  source 1..20: mol_type = genomic DNA
aaagtggctttaaaattgct

SEQ ID NO: 159783 - DNA, 20 bp, Homo sapiens
  source 1..20: mol_type = genomic DNA
aagtggctttaaaattgctc

SEQ ID NO: 159784 - DNA, 20 bp, Homo sapiens
  source 1..20: mol_type = genomic DNA
agtggctttaaaattgctct

SEQ ID NO: 159785 - DNA, 20 bp, Homo sapiens
  source 1..20: mol_type = genomic DNA
gtggctttaaaattgctctg

SEQ ID NO: 159786 - DNA, 20 bp, Homo sapiens
  source 1..20: mol_type = genomic DNA
tggctttaaaattgctctgc

SEQ ID NO: 159787 - DNA, 20 bp, Homo sapiens
  source 1..20: mol_type = genomic DNA
ggctttaaaattgctctgcc

SEQ ID NO: 159788 - DNA, 20 bp, Homo sapiens
  source 1..20: mol_type = genomic DNA
gctttaaaattgctctgcca

SEQ ID NO: 159789 - DNA, 20 bp, Homo sapiens
  source 1..20: mol_type = genomic DNA
ctttaaaattgctctgccag

SEQ ID NO: 159790 - DNA, 20 bp, Homo sapiens
  source 1..20: mol_type = genomic DNA
tttaaaattgctctgccagt

SEQ ID NO: 159791 - DNA, 20 bp, Homo sapiens
  source 1..20: mol_type = genomic DNA
ttaaaattgctctgccagta

SEQ ID NO: 159792 - DNA, 20 bp, Homo sapiens
  source 1..20: mol_type = genomic DNA
taaaattgctctgccagtag

SEQ ID NO: 159793 - DNA, 20 bp, Homo sapiens
  source 1..20: mol_type = genomic DNA
aaaattgctctgccagtagg

SEQ ID NO: 159794 - DNA, 20 bp, Homo sapiens
  source 1..20: mol_type = genomic DNA
aaattgctctgccagtaggc

SEQ ID NO: 159795 - DNA, 20 bp, Homo sapiens
  source 1..20: mol_type = genomic DNA
aattgctctgccagtaggca

SEQ ID NO: 159796 - DNA, 20 bp, Homo sapiens
  source 1..20: mol_type = genomic DNA
attgctctgccagtaggcag

SEQ ID NO: 159797 - DNA, 20 bp, Homo sapiens
  source 1..20: mol_type = genomic DNA
ttgctctgccagtaggcagg

SEQ ID NO: 159798 - DNA, 20 bp, Homo sapiens
  source 1..20: mol_type = genomic DNA
tgctctgccagtaggcaggt

SEQ ID NO: 159799 - DNA, 20 bp, Homo sapiens
  source 1..20: mol_type = genomic DNA
gctctgccagtaggcaggtt

SEQ ID NO: 159800 - DNA, 20 bp, Homo sapiens
  source 1..20: mol_type = genomic DNA
ctctgccagtaggcaggttg

SEQ ID NO: 159801 - DNA, 20 bp, Homo sapiens
  source 1..20: mol_type = genomic DNA
tctgccagtaggcaggttgc

SEQ ID NO: 159802 - DNA, 20 bp, Homo sapiens
  source 1..20: mol_type = genomic DNA
ctgccagtaggcaggttgct

SEQ ID NO: 159803 - DNA, 20 bp, Homo sapiens
  source 1..20: mol_type = genomic DNA
tgccagtaggcaggttgcta

SEQ ID NO: 159804 - DNA, 20 bp, Homo sapiens
  source 1..20: mol_type = genomic DNA
gccagtaggcaggttgctaa

SEQ ID NO: 159805 - DNA, 20 bp, Homo sapiens
  source 1..20: mol_type = genomic DNA
ccagtaggcaggttgctaag

SEQ ID NO: 159806 - DNA, 20 bp, Homo sapiens
  source 1..20: mol_type = genomic DNA
cagtaggcaggttgctaaga

SEQ ID NO: 159807 - DNA, 20 bp, Homo sapiens
  source 1..20: mol_type = genomic DNA
agtaggcaggttgctaagat

SEQ ID NO: 159808 - DNA, 20 bp, Homo sapiens
  source 1..20: mol_type = genomic DNA
gtaggcaggttgctaagatg

SEQ ID NO: 159809 - DNA, 20 bp, Homo sapiens
  source 1..20: mol_type = genomic DNA
taggcaggttgctaagatgg

SEQ ID NO: 159810 - DNA, 20 bp, Homo sapiens
  source 1..20: mol_type = genomic DNA
aggcaggttgctaagatggt

SEQ ID NO: 159811 - DNA, 20 bp, Homo sapiens
  source 1..20: mol_type = genomic DNA
ggcaggttgctaagatggtc

SEQ ID NO: 159812 - DNA, 20 bp, Homo sapiens
  source 1..20: mol_type = genomic DNA
gcaggttgctaagatggtca

SEQ ID NO: 159813 - DNA, 20 bp, Homo sapiens
  source 1..20: mol_type = genomic DNA
caggttgctaagatggtcag

SEQ ID NO: 159814 - DNA, 20 bp, Homo sapiens
  source 1..20: mol_type = genomic DNA
aggttgctaagatggtcaga

SEQ ID NO: 159815 - DNA, 20 bp, Homo sapiens
  source 1..20: mol_type = genomic DNA
ggttgctaagatggtcagag

SEQ ID NO: 159816 - DNA, 20 bp, Homo sapiens
  source 1..20: mol_type = genomic DNA
gttgctaagatggtcagaga

SEQ ID NO: 159817 - DNA, 20 bp, Homo sapiens
  source 1..20: mol_type = genomic DNA
ttgctaagatggtcagagac

SEQ ID NO: 159818 - DNA, 20 bp, Homo sapiens
  source 1..20: mol_type = genomic DNA
tgctaagatggtcagagaca

SEQ ID NO: 159819 - DNA, 20 bp, Homo sapiens
  source 1..20: mol_type = genomic DNA
gctaagatggtcagagacaa

SEQ ID NO: 159820 - DNA, 20 bp, Homo sapiens
  source 1..20: mol_type = genomic DNA
ctaagatggtcagagacaaa

SEQ ID NO: 159821 - DNA, 20 bp, Homo sapiens
  source 1..20: mol_type = genomic DNA
taagatggtcagagacaaac

SEQ ID NO: 159822 - DNA, 20 bp, Homo sapiens
  source 1..20: mol_type = genomic DNA
aagatggtcagagacaaact

SEQ ID NO: 159823 - DNA, 20 bp, Homo sapiens
  source 1..20: mol_type = genomic DNA
agatggtcagagacaaactt

SEQ ID NO: 159824 - DNA, 20 bp, Homo sapiens
  source 1..20: mol_type = genomic DNA
gatggtcagagacaaacttc

SEQ ID NO: 159825 - DNA, 20 bp, Homo sapiens
  source 1..20: mol_type = genomic DNA
atggtcagagacaaacttct

SEQ ID NO: 159826 - DNA, 20 bp, Homo sapiens
  source 1..20: mol_type = genomic DNA
tggtcagagacaaacttctg

SEQ ID NO: 159827 - DNA, 20 bp, Homo sapiens
  source 1..20: mol_type = genomic DNA
ggtcagagacaaacttctga

SEQ ID NO: 159828 - DNA, 20 bp, Homo sapiens
  source 1..20: mol_type = genomic DNA
gtcagagacaaacttctgaa

SEQ ID NO: 159829 - DNA, 20 bp, Homo sapiens
  source 1..20: mol_type = genomic DNA
tcagagacaaacttctgaac

SEQ ID NO: 159830 - DNA, 20 bp, Homo sapiens
  source 1..20: mol_type = genomic DNA
cagagacaaacttctgaacg

SEQ ID NO: 159831 - DNA, 20 bp, Homo sapiens
  source 1..20: mol_type = genomic DNA
agagacaaacttctgaacga

SEQ ID NO: 159832 - DNA, 20 bp, Homo sapiens
  source 1..20: mol_type = genomic DNA
gagacaaacttctgaacgac

SEQ ID NO: 159833 - DNA, 20 bp, Homo sapiens
  source 1..20: mol_type = genomic DNA
agacaaacttctgaacgact

SEQ ID NO: 159834 - DNA, 20 bp, Homo sapiens
  source 1..20: mol_type = genomic DNA
gacaaacttctgaacgactc

SEQ ID NO: 159835 - DNA, 20 bp, Homo sapiens
  source 1..20: mol_type = genomic DNA
acaaacttctgaacgactct

SEQ ID NO: 159836 - DNA, 20 bp, Homo sapiens
  source 1..20: mol_type = genomic DNA
caaacttctgaacgactctt

SEQ ID NO: 159837 - DNA, 20 bp, Homo sapiens
  source 1..20: mol_type = genomic DNA
aaacttctgaacgactcttg

SEQ ID NO: 159838 - DNA, 20 bp, Homo sapiens
  source 1..20: mol_type = genomic DNA
aacttctgaacgactcttgt

SEQ ID NO: 159839 - DNA, 20 bp, Homo sapiens
  source 1..20: mol_type = genomic DNA
acttctgaacgactcttgta

SEQ ID NO: 159840 - DNA, 20 bp, Homo sapiens
  source 1..20: mol_type = genomic DNA
cttctgaacgactcttgtaa

SEQ ID NO: 159841 - DNA, 20 bp, Homo sapiens
  source 1..20: mol_type = genomic DNA
ttctgaacgactcttgtaaa

SEQ ID NO: 159842 - DNA, 20 bp, Homo sapiens
  source 1..20: mol_type = genomic DNA
tctgaacgactcttgtaaaa

SEQ ID NO: 159843 - DNA, 20 bp, Homo sapiens
  source 1..20: mol_type = genomic DNA
ctgaacgactcttgtaaaat

SEQ ID NO: 159844 - DNA, 20 bp, Homo sapiens
  source 1..20: mol_type = genomic DNA
tgaacgactcttgtaaaata

SEQ ID NO: 159845 - DNA, 20 bp, Homo sapiens
  source 1..20: mol_type = genomic DNA
gaacgactcttgtaaaatat

SEQ ID NO: 159846 - DNA, 20 bp, Homo sapiens
  source 1..20: mol_type = genomic DNA
aacgactcttgtaaaatata

SEQ ID NO: 159847 - DNA, 20 bp, Homo sapiens
  source 1..20: mol_type = genomic DNA
acgactcttgtaaaatatac

SEQ ID NO: 159848 - DNA, 20 bp, Homo sapiens
  source 1..20: mol_type = genomic DNA
cgactcttgtaaaatataca

SEQ ID NO: 159849 - DNA, 20 bp, Homo sapiens
  source 1..20: mol_type = genomic DNA
gactcttgtaaaatatacag

SEQ ID NO: 159850 - DNA, 20 bp, Homo sapiens
  source 1..20: mol_type = genomic DNA
actcttgtaaaatatacaga

SEQ ID NO: 159851 - DNA, 20 bp, Homo sapiens
  source 1..20: mol_type = genomic DNA
ctcttgtaaaatatacagaa

SEQ ID NO: 159852 - DNA, 20 bp, Homo sapiens
  source 1..20: mol_type = genomic DNA
tcttgtaaaatatacagaaa

SEQ ID NO: 159853 - DNA, 20 bp, Homo sapiens
  source 1..20: mol_type = genomic DNA
cttgtaaaatatacagaaat

SEQ ID NO: 159854 - DNA, 20 bp, Homo sapiens
  source 1..20: mol_type = genomic DNA
ttgtaaaatatacagaaata

SEQ ID NO: 159855 - DNA, 20 bp, Homo sapiens
  source 1..20: mol_type = genomic DNA
tgtaaaatatacagaaatat

SEQ ID NO: 159856 - DNA, 20 bp, Homo sapiens
  source 1..20: mol_type = genomic DNA
gtaaaatatacagaaatatt

SEQ ID NO: 159857 - DNA, 20 bp, Homo sapiens
  source 1..20: mol_type = genomic DNA
taaaatatacagaaatattt

SEQ ID NO: 159858 - DNA, 20 bp, Homo sapiens
  source 1..20: mol_type = genomic DNA
aaaatatacagaaatatttt

SEQ ID NO: 159859 - DNA, 20 bp, Homo sapiens
  source 1..20: mol_type = genomic DNA
aaatatacagaaatattttc

SEQ ID NO: 159860 - DNA, 20 bp, Homo sapiens
  source 1..20: mol_type = genomic DNA
aatatacagaaatattttca

SEQ ID NO: 159861 - DNA, 20 bp, Homo sapiens
  source 1..20: mol_type = genomic DNA
atatacagaaatattttcag

SEQ ID NO: 159862 - DNA, 20 bp, Homo sapiens
  source 1..20: mol_type = genomic DNA
tatacagaaatattttcaga

SEQ ID NO: 159863 - DNA, 20 bp, Homo sapiens
  source 1..20: mol_type = genomic DNA
atacagaaatattttcagaa

SEQ ID NO: 159864 - DNA, 20 bp, Homo sapiens
  source 1..20: mol_type = genomic DNA
tacagaaatattttcagaac

SEQ ID NO: 159865 - DNA, 20 bp, Homo sapiens
  source 1..20: mol_type = genomic DNA
acagaaatattttcagaact

SEQ ID NO: 159866 - DNA, 20 bp, Homo sapiens
  source 1..20: mol_type = genomic DNA
cagaaatattttcagaactt

SEQ ID NO: 159867 - DNA, 20 bp, Homo sapiens
  source 1..20: mol_type = genomic DNA
agaaatattttcagaacttt

SEQ ID NO: 159868 - DNA, 20 bp, Homo sapiens
  source 1..20: mol_type = genomic DNA
gaaatattttcagaactttt

SEQ ID NO: 159869 - DNA, 20 bp, Homo sapiens
  source 1..20: mol_type = genomic DNA
aaatattttcagaactttta

SEQ ID NO: 159870 - DNA, 20 bp, Homo sapiens
  source 1..20: mol_type = genomic DNA
aatattttcagaacttttat

SEQ ID NO: 159871 - DNA, 20 bp, Homo sapiens
  source 1..20: mol_type = genomic DNA
atattttcagaacttttatc

SEQ ID NO: 159872 - DNA, 20 bp, Homo sapiens
  source 1..20: mol_type = genomic DNA
tattttcagaacttttatca

SEQ ID NO: 159873 - DNA, 20 bp, Homo sapiens
  source 1..20: mol_type = genomic DNA
attttcagaacttttatcag

SEQ ID NO: 159874 - DNA, 20 bp, Homo sapiens
  source 1..20: mol_type = genomic DNA
ttttcagaacttttatcagt

SEQ ID NO: 159875 - DNA, 20 bp, Homo sapiens
  source 1..20: mol_type = genomic DNA
tttcagaacttttatcagta

SEQ ID NO: 159876 - DNA, 20 bp, Homo sapiens
  source 1..20: mol_type = genomic DNA
ttcagaacttttatcagtaa

SEQ ID NO: 159877 - DNA, 20 bp, Homo sapiens
  source 1..20: mol_type = genomic DNA
tcagaacttttatcagtaaa

SEQ ID NO: 159878 - DNA, 20 bp, Homo sapiens
  source 1..20: mol_type = genomic DNA
cagaacttttatcagtaaaa

SEQ ID NO: 159879 - DNA, 20 bp, Homo sapiens
  source 1..20: mol_type = genomic DNA
agaacttttatcagtaaaat

SEQ ID NO: 159880 - DNA, 20 bp, Homo sapiens
  source 1..20: mol_type = genomic DNA
gaacttttatcagtaaaatt

SEQ ID NO: 159881 - DNA, 20 bp, Homo sapiens
  source 1..20: mol_type = genomic DNA
aacttttatcagtaaaatta

SEQ ID NO: 159882 - DNA, 20 bp, Homo sapiens
  source 1..20: mol_type = genomic DNA
acttttatcagtaaaattac

SEQ ID NO: 159883 - DNA, 20 bp, Homo sapiens
  source 1..20: mol_type = genomic DNA
cttttatcagtaaaattaca

SEQ ID NO: 159884 - DNA, 20 bp, Homo sapiens
  source 1..20: mol_type = genomic DNA
ttttatcagtaaaattacaa

SEQ ID NO: 159885 - DNA, 20 bp, Homo sapiens
  source 1..20: mol_type = genomic DNA
tttatcagtaaaattacaaa

SEQ ID NO: 159886 - DNA, 20 bp, Homo sapiens
  source 1..20: mol_type = genomic DNA
ttatcagtaaaattacaaaa

SEQ ID NO: 159887 - DNA, 20 bp, Homo sapiens
  source 1..20: mol_type = genomic DNA
tatcagtaaaattacaaaac

SEQ ID NO: 159888 - DNA, 20 bp, Homo sapiens
  source 1..20: mol_type = genomic DNA
atcagtaaaattacaaaacg

SEQ ID NO: 159889 - DNA, 20 bp, Homo sapiens
  source 1..20: mol_type = genomic DNA
tcagtaaaattacaaaacgt

SEQ ID NO: 159890 - DNA, 20 bp, Homo sapiens
  source 1..20: mol_type = genomic DNA
cagtaaaattacaaaacgtg

SEQ ID NO: 159891 - DNA, 20 bp, Homo sapiens
  source 1..20: mol_type = genomic DNA
agtaaaattacaaaacgtgt

SEQ ID NO: 159892 - DNA, 20 bp, Homo sapiens
  source 1..20: mol_type = genomic DNA
gtaaaattacaaaacgtgtt

SEQ ID NO: 159893 - DNA, 20 bp, Homo sapiens
  source 1..20: mol_type = genomic DNA
taaaattacaaaacgtgttg

SEQ ID NO: 159894 - DNA, 20 bp, Homo sapiens
  source 1..20: mol_type = genomic DNA
aaaattacaaaacgtgttgc

SEQ ID NO: 159895 - DNA, 20 bp, Homo sapiens
  source 1..20: mol_type = genomic DNA
aaattacaaaacgtgttgca

SEQ ID NO: 159896 - DNA, 20 bp, Homo sapiens
  source 1..20: mol_type = genomic DNA
aattacaaaacgtgttgcaa

SEQ ID NO: 159897 - DNA, 20 bp, Homo sapiens
  source 1..20: mol_type = genomic DNA
attacaaaacgtgttgcaag

SEQ ID NO: 159898 - DNA, 20 bp, Homo sapiens
  source 1..20: mol_type = genomic DNA
ttacaaaacgtgttgcaagg

SEQ ID NO: 159899 - DNA, 20 bp, Homo sapiens
  source 1..20: mol_type = genomic DNA
tacaaaacgtgttgcaagga

SEQ ID NO: 159900 - DNA, 20 bp, Homo sapiens
  source 1..20: mol_type = genomic DNA
acaaaacgtgttgcaaggaa

SEQ ID NO: 159901 - DNA, 20 bp, Homo sapiens
  source 1..20: mol_type = genomic DNA
caaaacgtgttgcaaggaag

SEQ ID NO: 159902 - DNA, 20 bp, Homo sapiens
  source 1..20: mol_type = genomic DNA
aaaacgtgttgcaaggaagg

SEQ ID NO: 159903 - DNA, 20 bp, Homo sapiens
  source 1..20: mol_type = genomic DNA
aaacgtgttgcaaggaaggt

SEQ ID NO: 159904 - DNA, 20 bp, Homo sapiens
  source 1..20: mol_type = genomic DNA
aacgtgttgcaaggaaggtg

SEQ ID NO: 159905 - DNA, 20 bp, Homo sapiens
  source 1..20: mol_type = genomic DNA
acgtgttgcaaggaaggtgc

SEQ ID NO: 159906 - DNA, 20 bp, Homo sapiens
  source 1..20: mol_type = genomic DNA
cgtgttgcaaggaaggtgct

SEQ ID NO: 159907 - DNA, 20 bp, Homo sapiens
  source 1..20: mol_type = genomic DNA
gtgttgcaaggaaggtgctt

SEQ ID NO: 159908 - DNA, 20 bp, Homo sapiens
  source 1..20: mol_type = genomic DNA
tgttgcaaggaaggtgcttg

SEQ ID NO: 159909 - DNA, 20 bp, Homo sapiens
  source 1..20: mol_type = genomic DNA
gttgcaaggaaggtgcttgt

SEQ ID NO: 159910 - DNA, 20 bp, Homo sapiens
  source 1..20: mol_type = genomic DNA
ttgcaaggaaggtgcttgtg

SEQ ID NO: 159911 - DNA, 20 bp, Homo sapiens
  source 1..20: mol_type = genomic DNA
tgcaaggaaggtgcttgtga

SEQ ID NO: 159912 - DNA, 20 bp, Homo sapiens
  source 1..20: mol_type = genomic DNA
gcaaggaaggtgcttgtgat

SEQ ID NO: 159913 - DNA, 20 bp, Homo sapiens
  source 1..20: mol_type = genomic DNA
caaggaaggtgcttgtgata

SEQ ID NO: 159914 - DNA, 20 bp, Homo sapiens
  source 1..20: mol_type = genomic DNA
aaggaaggtgcttgtgataa

SEQ ID NO: 159915 - DNA, 20 bp, Homo sapiens
  source 1..20: mol_type = genomic DNA
aggaaggtgcttgtgataac

SEQ ID NO: 159916 - DNA, 20 bp, Homo sapiens
  source 1..20: mol_type = genomic DNA
ggaaggtgcttgtgataaca

SEQ ID NO: 159917 - DNA, 20 bp, Homo sapiens
  source 1..20: mol_type = genomic DNA
gaaggtgcttgtgataacac

SEQ ID NO: 159918 - DNA, 20 bp, Homo sapiens
  source 1..20: mol_type = genomic DNA
aaggtgcttgtgataacact

SEQ ID NO: 159919 - DNA, 20 bp, Homo sapiens
  source 1..20: mol_type = genomic DNA
aggtgcttgtgataacactg

SEQ ID NO: 159920 - DNA, 20 bp, Homo sapiens
  source 1..20: mol_type = genomic DNA
ggtgcttgtgataacactgt

SEQ ID NO: 159921 - DNA, 20 bp, Homo sapiens
  source 1..20: mol_type = genomic DNA
gtgcttgtgataacactgtc

SEQ ID NO: 159922 - DNA, 20 bp, Homo sapiens
  source 1..20: mol_type = genomic DNA
tgcttgtgataacactgtcc

SEQ ID NO: 159923 - DNA, 20 bp, Homo sapiens
  source 1..20: mol_type = genomic DNA
gcttgtgataacactgtccc

SEQ ID NO: 159924 - DNA, 20 bp, Homo sapiens
  source 1..20: mol_type = genomic DNA
cttgtgataacactgtcccc

SEQ ID NO: 159925 - DNA, 20 bp, Homo sapiens
  source 1..20: mol_type = genomic DNA
ttgtgataacactgtcccca

SEQ ID NO: 159926 - DNA, 20 bp, Homo sapiens
  source 1..20: mol_type = genomic DNA
tgtgataacactgtccccag

SEQ ID NO: 159927 - DNA, 20 bp, Homo sapiens
  source 1..20: mol_type = genomic DNA
gtgataacactgtccccaga

SEQ ID NO: 159928 - DNA, 20 bp, Homo sapiens
  source 1..20: mol_type = genomic DNA
tgataacactgtccccagaa

SEQ ID NO: 159929 - DNA, 20 bp, Homo sapiens
  source 1..20: mol_type = genomic DNA
gataacactgtccccagaac

SEQ ID NO: 159930 - DNA, 20 bp, Homo sapiens
  source 1..20: mol_type = genomic DNA
ataacactgtccccagaacc

SEQ ID NO: 159931 - DNA, 20 bp, Homo sapiens
  source 1..20: mol_type = genomic DNA
taacactgtccccagaacct

SEQ ID NO: 159932 - DNA, 20 bp, Homo sapiens
  source 1..20: mol_type = genomic DNA
aacactgtccccagaacctt

SEQ ID NO: 159933 - DNA, 20 bp, Homo sapiens
  source 1..20: mol_type = genomic DNA
acactgtccccagaacctta

SEQ ID NO: 159934 - DNA, 20 bp, Homo sapiens
  source 1..20: mol_type = genomic DNA
cactgtccccagaaccttag

SEQ ID NO: 159935 - DNA, 20 bp, Homo sapiens
  source 1..20: mol_type = genomic DNA
actgtccccagaaccttagt

SEQ ID NO: 159936 - DNA, 20 bp, Homo sapiens
  source 1..20: mol_type = genomic DNA
ctgtccccagaaccttagtg

SEQ ID NO: 159937 - DNA, 20 bp, Homo sapiens
  source 1..20: mol_type = genomic DNA
tgtccccagaaccttagtga

SEQ ID NO: 159938 - DNA, 20 bp, Homo sapiens
  source 1..20: mol_type = genomic DNA
gtccccagaaccttagtgaa

SEQ ID NO: 159939 - DNA, 20 bp, Homo sapiens
  source 1..20: mol_type = genomic DNA
tccccagaaccttagtgaag

SEQ ID NO: 159940 - DNA, 20 bp, Homo sapiens
  source 1..20: mol_type = genomic DNA
ccccagaaccttagtgaagt

SEQ ID NO: 159941 - DNA, 20 bp, Homo sapiens
  source 1..20: mol_type = genomic DNA
cccagaaccttagtgaagtt

SEQ ID NO: 159942 - DNA, 20 bp, Homo sapiens
  source 1..20: mol_type = genomic DNA
ccagaaccttagtgaagtta

SEQ ID NO: 159943 - DNA, 20 bp, Homo sapiens
  source 1..20: mol_type = genomic DNA
cagaaccttagtgaagttac

SEQ ID NO: 159944 - DNA, 20 bp, Homo sapiens
  source 1..20: mol_type = genomic DNA
agaaccttagtgaagttacc

SEQ ID NO: 159945 - DNA, 20 bp, Homo sapiens
  source 1..20: mol_type = genomic DNA
gaaccttagtgaagttacca

SEQ ID NO: 159946 - DNA, 20 bp, Homo sapiens
  source 1..20: mol_type = genomic DNA
aaccttagtgaagttaccaa

SEQ ID NO: 159947 - DNA, 20 bp, Homo sapiens
  source 1..20: mol_type = genomic DNA
accttagtgaagttaccaac

SEQ ID NO: 159948 - DNA, 20 bp, Homo sapiens
  source 1..20: mol_type = genomic DNA
ccttagtgaagttaccaact

SEQ ID NO: 159949 - DNA, 20 bp, Homo sapiens
  source 1..20: mol_type = genomic DNA
cttagtgaagttaccaactg

SEQ ID NO: 159950 - DNA, 20 bp, Homo sapiens
  source 1..20: mol_type = genomic DNA
ttagtgaagttaccaactgg

SEQ ID NO: 159951 - DNA, 20 bp, Homo sapiens
  source 1..20: mol_type = genomic DNA
tagtgaagttaccaactggt

SEQ ID NO: 159952 - DNA, 20 bp, Homo sapiens
  source 1..20: mol_type = genomic DNA
agtgaagttaccaactggtg

SEQ ID NO: 159953 - DNA, 20 bp, Homo sapiens
  source 1..20: mol_type = genomic DNA
gtgaagttaccaactggtgg

SEQ ID NO: 159954 - DNA, 20 bp, Homo sapiens
  source 1..20: mol_type = genomic DNA
tgaagttaccaactggtgga

SEQ ID NO: 159955 - DNA, 20 bp, Homo sapiens
  source 1..20: mol_type = genomic DNA
gaagttaccaactggtggaa

SEQ ID NO: 159956 - DNA, 20 bp, Homo sapiens
  source 1..20: mol_type = genomic DNA
aagttaccaactggtggaaa

SEQ ID NO: 159957 - DNA, 20 bp, Homo sapiens
  source 1..20: mol_type = genomic DNA
agttaccaactggtggaaaa

SEQ ID NO: 159958 - DNA, 20 bp, Homo sapiens
  source 1..20: mol_type = genomic DNA
gttaccaactggtggaaaat

SEQ ID NO: 159959 - DNA, 20 bp, Homo sapiens
  source 1..20: mol_type = genomic DNA
ttaccaactggtggaaaatt

SEQ ID NO: 159960 - DNA, 20 bp, Homo sapiens
  source 1..20: mol_type = genomic DNA
taccaactggtggaaaattt

SEQ ID NO: 159961 - DNA, 20 bp, Homo sapiens
  source 1..20: mol_type = genomic DNA
accaactggtggaaaatttt

SEQ ID NO: 159962 - DNA, 20 bp, Homo sapiens
  source 1..20: mol_type = genomic DNA
ccaactggtggaaaattttc

SEQ ID NO: 159963 - DNA, 20 bp, Homo sapiens
  source 1..20: mol_type = genomic DNA
caactggtggaaaattttct

SEQ ID NO: 159964 - DNA, 20 bp, Homo sapiens
  source 1..20: mol_type = genomic DNA
aactggtggaaaattttctc

SEQ ID NO: 159965 - DNA, 20 bp, Homo sapiens
  source 1..20: mol_type = genomic DNA
actggtggaaaattttctct

SEQ ID NO: 159966 - DNA, 20 bp, Homo sapiens
  source 1..20: mol_type = genomic DNA
ctggtggaaaattttctctt

SEQ ID NO: 159967 - DNA, 20 bp, Homo sapiens
  source 1..20: mol_type = genomic DNA
tggtggaaaattttctcttg

SEQ ID NO: 159968 - DNA, 20 bp, Homo sapiens
  source 1..20: mol_type = genomic DNA
ggtggaaaattttctcttgc

SEQ ID NO: 159969 - DNA, 20 bp, Homo sapiens
  source 1..20: mol_type = genomic DNA
gtggaaaattttctcttgca

SEQ ID NO: 159970 - DNA, 20 bp, Homo sapiens
  source 1..20: mol_type = genomic DNA
tggaaaattttctcttgcac

SEQ ID NO: 159971 - DNA, 20 bp, Homo sapiens
  source 1..20: mol_type = genomic DNA
ggaaaattttctcttgcact

SEQ ID NO: 159972 - DNA, 20 bp, Homo sapiens
  source 1..20: mol_type = genomic DNA
gaaaattttctcttgcactc

SEQ ID NO: 159973 - DNA, 20 bp, Homo sapiens
  source 1..20: mol_type = genomic DNA
aaaattttctcttgcactcg

SEQ ID NO: 159974 - DNA, 20 bp, Homo sapiens
  source 1..20: mol_type = genomic DNA
aaattttctcttgcactcgg

SEQ ID NO: 159975 - DNA, 20 bp, Homo sapiens
  source 1..20: mol_type = genomic DNA
aattttctcttgcactcggc

SEQ ID NO: 159976 - DNA, 20 bp, Homo sapiens
  source 1..20: mol_type = genomic DNA
attttctcttgcactcggct

SEQ ID NO: 159977 - DNA, 20 bp, Homo sapiens
  source 1..20: mol_type = genomic DNA
ttttctcttgcactcggctt

SEQ ID NO: 159978 - DNA, 20 bp, Homo sapiens
  source 1..20: mol_type = genomic DNA
tttctcttgcactcggctta

SEQ ID NO: 159979 - DNA, 20 bp, Homo sapiens
  source 1..20: mol_type = genomic DNA
ttctcttgcactcggcttaa

SEQ ID NO: 159980 - DNA, 20 bp, Homo sapiens
  source 1..20: mol_type = genomic DNA
tctcttgcactcggcttaaa

SEQ ID NO: 159981 - DNA, 20 bp, Homo sapiens
  source 1..20: mol_type = genomic DNA
ctcttgcactcggcttaaaa

SEQ ID NO: 159982 - DNA, 20 bp, Homo sapiens
  source 1..20: mol_type = genomic DNA
tcttgcactcggcttaaaaa

SEQ ID NO: 159983 - DNA, 20 bp, Homo sapiens
  source 1..20: mol_type = genomic DNA
cttgcactcggcttaaaaat

SEQ ID NO: 159984 - DNA, 20 bp, Homo sapiens
  source 1..20: mol_type = genomic DNA
ttgcactcggcttaaaaatc

SEQ ID NO: 159985 - DNA, 20 bp, Homo sapiens
  source 1..20: mol_type = genomic DNA
tgcactcggcttaaaaatca

SEQ ID NO: 159986 - DNA, 20 bp, Homo sapiens
  source 1..20: mol_type = genomic DNA
gcactcggcttaaaaatcat

SEQ ID NO: 159987 - DNA, 20 bp, Homo sapiens
  source 1..20: mol_type = genomic DNA
cactcggcttaaaaatcatg

SEQ ID NO: 159988 - DNA, 20 bp, Homo sapiens
  source 1..20: mol_type = genomic DNA
actcggcttaaaaatcatga

SEQ ID NO: 159989 - DNA, 20 bp, Homo sapiens
  source 1..20: mol_type = genomic DNA
ctcggcttaaaaatcatgag

SEQ ID NO: 159990 - DNA, 20 bp, Homo sapiens
  source 1..20: mol_type = genomic DNA
tcggcttaaaaatcatgagg

SEQ ID NO: 159991 - DNA, 20 bp, Homo sapiens
  source 1..20: mol_type = genomic DNA
cggcttaaaaatcatgaggg

SEQ ID NO: 159992 - DNA, 20 bp, Homo sapiens
  source 1..20: mol_type = genomic DNA
ggcttaaaaatcatgaggga

SEQ ID NO: 159993 - DNA, 20 bp, Homo sapiens
  source 1..20: mol_type = genomic DNA
gcttaaaaatcatgagggaa

SEQ ID NO: 159994 - DNA, 20 bp, Homo sapiens
  source 1..20: mol_type = genomic DNA
cttaaaaatcatgagggaat

SEQ ID NO: 159995 - DNA, 20 bp, Homo sapiens
  source 1..20: mol_type = genomic DNA
ttaaaaatcatgagggaata

SEQ ID NO: 159996 - DNA, 20 bp, Homo sapiens
  source 1..20: mol_type = genomic DNA
taaaaatcatgagggaatat

SEQ ID NO: 159997 - DNA, 20 bp, Homo sapiens
  source 1..20: mol_type = genomic DNA
aaaaatcatgagggaatatt

SEQ ID NO: 159998 - DNA, 20 bp, Homo sapiens
  source 1..20: mol_type = genomic DNA
aaaatcatgagggaatattt

SEQ ID NO: 159999 - DNA, 20 bp, Homo sapiens
  source 1..20: mol_type = genomic DNA
aaatcatgagggaatattta

SEQ ID NO: 160000 - DNA, 20 bp, Homo sapiens
  source 1..20: mol_type = genomic DNA
aatcatgagggaatatttac

SEQ ID NO: 160001 - DNA, 20 bp, Homo sapiens
  source 1..20: mol_type = genomic DNA
atcatgagggaatatttact

SEQ ID NO: 160002 - DNA, 20 bp, Homo sapiens
  source 1..20: mol_type = genomic DNA
tcatgagggaatatttacta

SEQ ID NO: 160003 - DNA, 20 bp, Homo sapiens
  source 1..20: mol_type = genomic DNA
catgagggaatatttactat

SEQ ID NO: 160004 - DNA, 20 bp, Homo sapiens
  source 1..20: mol_type = genomic DNA
atgagggaatatttactata

SEQ ID NO: 160005 - DNA, 20 bp, Homo sapiens
  source 1..20: mol_type = genomic DNA
tgagggaatatttactatac

SEQ ID NO: 160006 - DNA, 20 bp, Homo sapiens
  source 1..20: mol_type = genomic DNA
gagggaatatttactatacg

SEQ ID NO: 160007 - DNA, 20 bp, Homo sapiens
  source 1..20: mol_type = genomic DNA
agggaatatttactatacga

SEQ ID NO: 160008 - DNA, 20 bp, Homo sapiens
  source 1..20: mol_type = genomic DNA
gggaatatttactatacgaa

SEQ ID NO: 160009 - DNA, 20 bp, Homo sapiens
  source 1..20: mol_type = genomic DNA
ggaatatttactatacgaat

SEQ ID NO: 160010 - DNA, 20 bp, Homo sapiens
  source 1..20: mol_type = genomic DNA
gaatatttactatacgaatg

SEQ ID NO: 160011 - DNA, 20 bp, Homo sapiens
  source 1..20: mol_type = genomic DNA
aatatttactatacgaatga

SEQ ID NO: 160012 - DNA, 20 bp, Homo sapiens
  source 1..20: mol_type = genomic DNA
atatttactatacgaatgag

SEQ ID NO: 160013 - DNA, 20 bp, Homo sapiens
  source 1..20: mol_type = genomic DNA
tatttactatacgaatgaga

SEQ ID NO: 160014 - DNA, 20 bp, Homo sapiens
  source 1..20: mol_type = genomic DNA
atttactatacgaatgagat

SEQ ID NO: 160015 - DNA, 20 bp, Homo sapiens
  source 1..20: mol_type = genomic DNA
tttactatacgaatgagatt

SEQ ID NO: 160016 - DNA, 20 bp, Homo sapiens
  source 1..20: mol_type = genomic DNA
ttactatacgaatgagattc

SEQ ID NO: 160017 - DNA, 20 bp, Homo sapiens
  source 1..20: mol_type = genomic DNA
tactatacgaatgagattca

SEQ ID NO: 160018 - DNA, 20 bp, Homo sapiens
  source 1..20: mol_type = genomic DNA
actatacgaatgagattcag

SEQ ID NO: 160019 - DNA, 20 bp, Homo sapiens
  source 1..20: mol_type = genomic DNA
ctatacgaatgagattcagt

SEQ ID NO: 160020 - DNA, 20 bp, Homo sapiens
  source 1..20: mol_type = genomic DNA
tatacgaatgagattcagtc

SEQ ID NO: 160021 - DNA, 20 bp, Homo sapiens
  source 1..20: mol_type = genomic DNA
atacgaatgagattcagtct

SEQ ID NO: 160022 - DNA, 20 bp, Homo sapiens
  source 1..20: mol_type = genomic DNA
tacgaatgagattcagtctt

SEQ ID NO: 160023 - DNA, 20 bp, Homo sapiens
  source 1..20: mol_type = genomic DNA
acgaatgagattcagtcttt

SEQ ID NO: 160024 - DNA, 20 bp, Homo sapiens
  source 1..20: mol_type = genomic DNA
cgaatgagattcagtcttta

SEQ ID NO: 160025 - DNA, 20 bp, Homo sapiens
  source 1..20: mol_type = genomic DNA
gaatgagattcagtctttaa

SEQ ID NO: 160026 - DNA, 20 bp, Homo sapiens
  source 1..20: mol_type = genomic DNA
aatgagattcagtctttaaa

SEQ ID NO: 160027 - DNA, 20 bp, Homo sapiens
  source 1..20: mol_type = genomic DNA
atgagattcagtctttaaag

SEQ ID NO: 160028 - DNA, 20 bp, Homo sapiens
  source 1..20: mol_type = genomic DNA
tgagattcagtctttaaagg

SEQ ID NO: 160029 - DNA, 20 bp, Homo sapiens
  source 1..20: mol_type = genomic DNA
gagattcagtctttaaaggg

SEQ ID NO: 160030 - DNA, 20 bp, Homo sapiens
  source 1..20: mol_type = genomic DNA
agattcagtctttaaagggg

SEQ ID NO: 160031 - DNA, 20 bp, Homo sapiens
  source 1..20: mol_type = genomic DNA
gattcagtctttaaaggggt

SEQ ID NO: 160032 - DNA, 20 bp, Homo sapiens
  source 1..20: mol_type = genomic DNA
attcagtctttaaaggggtt

SEQ ID NO: 160033 - DNA, 20 bp, Homo sapiens
  source 1..20: mol_type = genomic DNA
ttcagtctttaaaggggttt

SEQ ID NO: 160034 - DNA, 20 bp, Homo sapiens
  source 1..20: mol_type = genomic DNA
tcagtctttaaaggggttta

SEQ ID NO: 160035 - DNA, 20 bp, Homo sapiens
  source 1..20: mol_type = genomic DNA
cagtctttaaaggggtttac

SEQ ID NO: 160036 - DNA, 20 bp, Homo sapiens
  source 1..20: mol_type = genomic DNA
agtctttaaaggggtttaca

SEQ ID NO: 160037 - DNA, 20 bp, Homo sapiens
  source 1..20: mol_type = genomic DNA
gtctttaaaggggtttacag

SEQ ID NO: 160038 - DNA, 20 bp, Homo sapiens
  source 1..20: mol_type = genomic DNA
tctttaaaggggtttacaga

SEQ ID NO: 160039 - DNA, 20 bp, Homo sapiens
  source 1..20: mol_type = genomic DNA
ctttaaaggggtttacagaa

SEQ ID NO: 160040 - DNA, 20 bp, Homo sapiens
  source 1..20: mol_type = genomic DNA
tttaaaggggtttacagaaa

SEQ ID NO: 160041 - DNA, 20 bp, Homo sapiens
  source 1..20: mol_type = genomic DNA
ttaaaggggtttacagaaac

SEQ ID NO: 160042 - DNA, 20 bp, Homo sapiens
  source 1..20: mol_type = genomic DNA
taaaggggtttacagaaacg

SEQ ID NO: 160043 - DNA, 20 bp, Homo sapiens
  source 1..20: mol_type = genomic DNA
aaaggggtttacagaaacgt

SEQ ID NO: 160044 - DNA, 20 bp, Homo sapiens
  source 1..20: mol_type = genomic DNA
aaggggtttacagaaacgtg

SEQ ID NO: 160045 - DNA, 20 bp, Homo sapiens
  source 1..20: mol_type = genomic DNA
aggggtttacagaaacgtga

SEQ ID NO: 160046 - DNA, 20 bp, Homo sapiens
  source 1..20: mol_type = genomic DNA
ggggtttacagaaacgtgag

SEQ ID NO: 160047 - DNA, 20 bp, Homo sapiens
  source 1..20: mol_type = genomic DNA
gggtttacagaaacgtgaga

SEQ ID NO: 160048 - DNA, 20 bp, Homo sapiens
  source 1..20: mol_type = genomic DNA
ggtttacagaaacgtgagag

SEQ ID NO: 160049 - DNA, 20 bp, Homo sapiens
  source 1..20: mol_type = genomic DNA
gtttacagaaacgtgagagg

SEQ ID NO: 160050 - DNA, 20 bp, Homo sapiens
  source 1..20: mol_type = genomic DNA
tttacagaaacgtgagagga

SEQ ID NO: 160051 - DNA, 20 bp, Homo sapiens
  source 1..20: mol_type = genomic DNA
ttacagaaacgtgagaggac

SEQ ID NO: 160052 - DNA, 20 bp, Homo sapiens
  source 1..20: mol_type = genomic DNA
tacagaaacgtgagaggaca

SEQ ID NO: 160053 - DNA, 20 bp, Homo sapiens
  source 1..20: mol_type = genomic DNA
acagaaacgtgagaggacag

SEQ ID NO: 160054 - DNA, 20 bp, Homo sapiens
  source 1..20: mol_type = genomic DNA
cagaaacgtgagaggacagg

SEQ ID NO: 160055 - DNA, 20 bp, Homo sapiens
  source 1..20: mol_type = genomic DNA
agaaacgtgagaggacagga

SEQ ID NO: 160056 - DNA, 20 bp, Homo sapiens
  source 1..20: mol_type = genomic DNA
gaaacgtgagaggacaggaa

SEQ ID NO: 160057 - DNA, 20 bp, Homo sapiens
  source 1..20: mol_type = genomic DNA
aaacgtgagaggacaggaac

SEQ ID NO: 160058 - DNA, 20 bp, Homo sapiens
  source 1..20: mol_type = genomic DNA
aacgtgagaggacaggaaca

SEQ ID NO: 160059 - DNA, 20 bp, Homo sapiens
  source 1..20: mol_type = genomic DNA
acgtgagaggacaggaacag

SEQ ID NO: 160060 - DNA, 20 bp, Homo sapiens
  source 1..20: mol_type = genomic DNA
cgtgagaggacaggaacagt

SEQ ID NO: 160061 - DNA, 20 bp, Homo sapiens
  source 1..20: mol_type = genomic DNA
gtgagaggacaggaacagtt

SEQ ID NO: 160062 - DNA, 20 bp, Homo sapiens
  source 1..20: mol_type = genomic DNA
tgagaggacaggaacagtta

SEQ ID NO: 160063 - DNA, 20 bp, Homo sapiens
  source 1..20: mol_type = genomic DNA
gagaggacaggaacagttag

SEQ ID NO: 160064 - DNA, 20 bp, Homo sapiens
  source 1..20: mol_type = genomic DNA
agaggacaggaacagttagt

SEQ ID NO: 160065 - DNA, 20 bp, Homo sapiens
  source 1..20: mol_type = genomic DNA
gaggacaggaacagttagtc

SEQ ID NO: 160066 - DNA, 20 bp, Homo sapiens
  source 1..20: mol_type = genomic DNA
aggacaggaacagttagtct

SEQ ID NO: 160067 - DNA, 20 bp, Homo sapiens
  source 1..20: mol_type = genomic DNA
ggacaggaacagttagtctg

SEQ ID NO: 160068 - DNA, 20 bp, Homo sapiens
  source 1..20: mol_type = genomic DNA
gacaggaacagttagtctgt

SEQ ID NO: 160069 - DNA, 20 bp, Homo sapiens
  source 1..20: mol_type = genomic DNA
acaggaacagttagtctgtg

SEQ ID NO: 160070 - DNA, 20 bp, Homo sapiens
  source 1..20: mol_type = genomic DNA
caggaacagttagtctgtgt

SEQ ID NO: 160071 - DNA, 20 bp, Homo sapiens
  source 1..20: mol_type = genomic DNA
aggaacagttagtctgtgta

SEQ ID NO: 160072 - DNA, 20 bp, Homo sapiens
  source 1..20: mol_type = genomic DNA
ggaacagttagtctgtgtaa

SEQ ID NO: 160073 - DNA, 20 bp, Homo sapiens
  source 1..20: mol_type = genomic DNA
gaacagttagtctgtgtaaa

SEQ ID NO: 160074 - DNA, 20 bp, Homo sapiens
  source 1..20: mol_type = genomic DNA
aacagttagtctgtgtaaat

SEQ ID NO: 160075 - DNA, 20 bp, Homo sapiens
  source 1..20: mol_type = genomic DNA
acagttagtctgtgtaaatg

SEQ ID NO: 160076 - DNA, 20 bp, Homo sapiens
  source 1..20: mol_type = genomic DNA
cagttagtctgtgtaaatgt

SEQ ID NO: 160077 - DNA, 20 bp, Homo sapiens
  source 1..20: mol_type = genomic DNA
agttagtctgtgtaaatgtc

SEQ ID NO: 160078 - DNA, 20 bp, Homo sapiens
  source 1..20: mol_type = genomic DNA
gttagtctgtgtaaatgtct

SEQ ID NO: 160079 - DNA, 20 bp, Homo sapiens
  source 1..20: mol_type = genomic DNA
ttagtctgtgtaaatgtctg

SEQ ID NO: 160080 - DNA, 20 bp, Homo sapiens
  source 1..20: mol_type = genomic DNA
tagtctgtgtaaatgtctga

SEQ ID NO: 160081 - DNA, 20 bp, Homo sapiens
  source 1..20: mol_type = genomic DNA
agtctgtgtaaatgtctgaa

SEQ ID NO: 160082 - DNA, 20 bp, Homo sapiens
  source 1..20: mol_type = genomic DNA
gtctgtgtaaatgtctgaaa

SEQ ID NO: 160083 - DNA, 20 bp, Homo sapiens
  source 1..20: mol_type = genomic DNA
tctgtgtaaatgtctgaaat

SEQ ID NO: 160084 - DNA, 20 bp, Homo sapiens
  source 1..20: mol_type = genomic DNA
ctgtgtaaatgtctgaaata

SEQ ID NO: 160085 - DNA, 20 bp, Homo sapiens
  source 1..20: mol_type = genomic DNA
tgtgtaaatgtctgaaatat

SEQ ID NO: 160086 - DNA, 20 bp, Homo sapiens
  source 1..20: mol_type = genomic DNA
gtgtaaatgtctgaaatata

SEQ ID NO: 160087 - DNA, 20 bp, Homo sapiens
  source 1..20: mol_type = genomic DNA
tgtaaatgtctgaaatatat

SEQ ID NO: 160088 - DNA, 20 bp, Homo sapiens
  source 1..20: mol_type = genomic DNA
gtaaatgtctgaaatatatg

SEQ ID NO: 160089 - DNA, 20 bp, Homo sapiens
  source 1..20: mol_type = genomic DNA
taaatgtctgaaatatatgt

SEQ ID NO: 160090 - DNA, 20 bp, Homo sapiens
  source 1..20: mol_type = genomic DNA
aaatgtctgaaatatatgtg

SEQ ID NO: 160091 - DNA, 20 bp, Homo sapiens
  source 1..20: mol_type = genomic DNA
aatgtctgaaatatatgtga

SEQ ID NO: 160092 - DNA, 20 bp, Homo sapiens
  source 1..20: mol_type = genomic DNA
atgtctgaaatatatgtgag

SEQ ID NO: 160093 - DNA, 20 bp, Homo sapiens
  source 1..20: mol_type = genomic DNA
tgtctgaaatatatgtgagg

SEQ ID NO: 160094 - DNA, 20 bp, Homo sapiens
  source 1..20: mol_type = genomic DNA
gtctgaaatatatgtgaggg

SEQ ID NO: 160095 - DNA, 20 bp, Homo sapiens
  source 1..20: mol_type = genomic DNA
tctgaaatatatgtgaggga

SEQ ID NO: 160096 - DNA, 20 bp, Homo sapiens
  source 1..20: mol_type = genomic DNA
ctgaaatatatgtgagggag

SEQ ID NO: 160097 - DNA, 20 bp, Homo sapiens
  source 1..20: mol_type = genomic DNA
tgaaatatatgtgagggaga

SEQ ID NO: 160098 - DNA, 20 bp, Homo sapiens
  source 1..20: mol_type = genomic DNA
gaaatatatgtgagggagat

SEQ ID NO: 160099 - DNA, 20 bp, Homo sapiens
  source 1..20: mol_type = genomic DNA
aaatatatgtgagggagata

SEQ ID NO: 160100 - DNA, 20 bp, Homo sapiens
  source 1..20: mol_type = genomic DNA
aatatatgtgagggagataa

SEQ ID NO: 160101 - DNA, 20 bp, Homo sapiens
  source 1..20: mol_type = genomic DNA
atatatgtgagggagataat

SEQ ID NO: 160102 - DNA, 20 bp, Homo sapiens
  source 1..20: mol_type = genomic DNA
tatatgtgagggagataatg

SEQ ID NO: 160103 - DNA, 20 bp, Homo sapiens
  source 1..20: mol_type = genomic DNA
atatgtgagggagataatga

SEQ ID NO: 160104 - DNA, 20 bp, Homo sapiens
  source 1..20: mol_type = genomic DNA
tatgtgagggagataatgag

SEQ ID NO: 160105 - DNA, 20 bp, Homo sapiens
  source 1..20: mol_type = genomic DNA
atgtgagggagataatgagt

SEQ ID NO: 160106 - DNA, 20 bp, Homo sapiens
  source 1..20: mol_type = genomic DNA
tgtgagggagataatgagtt

SEQ ID NO: 160107 - DNA, 20 bp, Homo sapiens
  source 1..20: mol_type = genomic DNA
gtgagggagataatgagttt

SEQ ID NO: 160108 - DNA, 20 bp, Homo sapiens
  source 1..20: mol_type = genomic DNA
tgagggagataatgagttta

SEQ ID NO: 160109 - DNA, 20 bp, Homo sapiens
  source 1..20: mol_type = genomic DNA
gagggagataatgagtttag

SEQ ID NO: 160110 - DNA, 20 bp, Homo sapiens
  source 1..20: mol_type = genomic DNA
agggagataatgagtttagc

SEQ ID NO: 160111 - DNA, 20 bp, Homo sapiens
  source 1..20: mol_type = genomic DNA
gggagataatgagtttagcc

SEQ ID NO: 160112 - DNA, 20 bp, Homo sapiens
  source 1..20: mol_type = genomic DNA
ggagataatgagtttagcct

SEQ ID NO: 160113 - DNA, 20 bp, Homo sapiens
  source 1..20: mol_type = genomic DNA
gagataatgagtttagcctt

SEQ ID NO: 160114 - DNA, 20 bp, Homo sapiens
  source 1..20: mol_type = genomic DNA
agataatgagtttagccttt

SEQ ID NO: 160115 - DNA, 20 bp, Homo sapiens
  source 1..20: mol_type = genomic DNA
gataatgagtttagcctttt

SEQ ID NO: 160116 - DNA, 20 bp, Homo sapiens
  source 1..20: mol_type = genomic DNA
ataatgagtttagccttttt

SEQ ID NO: 160117 - DNA, 20 bp, Homo sapiens
  source 1..20: mol_type = genomic DNA
taatgagtttagcctttttc

SEQ ID NO: 160118 - DNA, 20 bp, Homo sapiens
  source 1..20: mol_type = genomic DNA
aatgagtttagcctttttct

SEQ ID NO: 160119 - DNA, 20 bp, Homo sapiens
  source 1..20: mol_type = genomic DNA
atgagtttagcctttttctt

SEQ ID NO: 160120 - DNA, 20 bp, Homo sapiens
  source 1..20: mol_type = genomic DNA
tgagtttagcctttttcttt

SEQ ID NO: 160121 - DNA, 20 bp, Homo sapiens
  source 1..20: mol_type = genomic DNA
gagtttagcctttttcttta

SEQ ID NO: 160122 - DNA, 20 bp, Homo sapiens
  source 1..20: mol_type = genomic DNA
agtttagcctttttctttaa

SEQ ID NO: 160123 - DNA, 20 bp, Homo sapiens
  source 1..20: mol_type = genomic DNA
gtttagcctttttctttaat

SEQ ID NO: 160124 - DNA, 20 bp, Homo sapiens
  source 1..20: mol_type = genomic DNA
tttagcctttttctttaata

SEQ ID NO: 160125 - DNA, 20 bp, Homo sapiens
  source 1..20: mol_type = genomic DNA
ttagcctttttctttaatag

SEQ ID NO: 160126 - DNA, 20 bp, Homo sapiens
  source 1..20: mol_type = genomic DNA
tagcctttttctttaatagg

SEQ ID NO: 160127 - DNA, 20 bp, Homo sapiens
  source 1..20: mol_type = genomic DNA
agcctttttctttaataggt

SEQ ID NO: 160128 - DNA, 20 bp, Homo sapiens
  source 1..20: mol_type = genomic DNA
gcctttttctttaataggtc

SEQ ID NO: 160129 - DNA, 20 bp, Homo sapiens
  source 1..20: mol_type = genomic DNA
cctttttctttaataggtct

SEQ ID NO: 160130 - DNA, 20 bp, Homo sapiens
  source 1..20: mol_type = genomic DNA
ctttttctttaataggtctc

SEQ ID NO: 160131 - DNA, 20 bp, Homo sapiens
  source 1..20: mol_type = genomic DNA
tttttctttaataggtctcc

SEQ ID NO: 160132 - DNA, 20 bp, Homo sapiens
  source 1..20: mol_type = genomic DNA
ttttctttaataggtctcca

SEQ ID NO: 160133 - DNA, 20 bp, Homo sapiens
  source 1..20: mol_type = genomic DNA
tttctttaataggtctccag

SEQ ID NO: 160134 - DNA, 20 bp, Homo sapiens
  source 1..20: mol_type = genomic DNA
ttctttaataggtctccaga

SEQ ID NO: 160135 - DNA, 20 bp, Homo sapiens
  source 1..20: mol_type = genomic DNA
tctttaataggtctccagat

SEQ ID NO: 160136 - DNA, 20 bp, Homo sapiens
  source 1..20: mol_type = genomic DNA
ctttaataggtctccagatt

SEQ ID NO: 160137 - DNA, 20 bp, Homo sapiens
  source 1..20: mol_type = genomic DNA
tttaataggtctccagattt

SEQ ID NO: 160138 - DNA, 20 bp, Homo sapiens
  source 1..20: mol_type = genomic DNA
ttaataggtctccagatttt

SEQ ID NO: 160139 - DNA, 20 bp, Homo sapiens
  source 1..20: mol_type = genomic DNA
taataggtctccagattttc

SEQ ID NO: 160140 - DNA, 20 bp, Homo sapiens
  source 1..20: mol_type = genomic DNA
aataggtctccagattttct

SEQ ID NO: 160141 - DNA, 20 bp, Homo sapiens
  source 1..20: mol_type = genomic DNA
ataggtctccagattttctg

SEQ ID NO: 160142 - DNA, 20 bp, Homo sapiens
  source 1..20: mol_type = genomic DNA
taggtctccagattttctgg

SEQ ID NO: 160143 - DNA, 20 bp, Homo sapiens
  source 1..20: mol_type = genomic DNA
aggtctccagattttctgga

SEQ ID NO: 160144 - DNA, 20 bp, Homo sapiens
  source 1..20: mol_type = genomic DNA
ggtctccagattttctggaa

SEQ ID NO: 160145 - DNA, 20 bp, Homo sapiens
  source 1..20: mol_type = genomic DNA
gtctccagattttctggaaa

SEQ ID NO: 160146 - DNA, 20 bp, Homo sapiens
  source 1..20: mol_type = genomic DNA
tctccagattttctggaaaa

SEQ ID NO: 160147 - DNA, 20 bp, Homo sapiens
  source 1..20: mol_type = genomic DNA
ctccagattttctggaaaag

SEQ ID NO: 160148 - DNA, 20 bp, Homo sapiens
  source 1..20: mol_type = genomic DNA
tccagattttctggaaaagg

SEQ ID NO: 160149 - DNA, 20 bp, Homo sapiens
  source 1..20: mol_type = genomic DNA
ccagattttctggaaaaggt

SEQ ID NO: 160150 - DNA, 20 bp, Homo sapiens
  source 1..20: mol_type = genomic DNA
cagattttctggaaaaggtt

SEQ ID NO: 160151 - DNA, 20 bp, Homo sapiens
  source 1..20: mol_type = genomic DNA
agattttctggaaaaggttc

SEQ ID NO: 160152 - DNA, 20 bp, Homo sapiens
  source 1..20: mol_type = genomic DNA
gattttctggaaaaggttct

SEQ ID NO: 160153 - DNA, 20 bp, Homo sapiens
  source 1..20: mol_type = genomic DNA
attttctggaaaaggttctt

SEQ ID NO: 160154 - DNA, 20 bp, Homo sapiens
  source 1..20: mol_type = genomic DNA
ttttctggaaaaggttcttt

SEQ ID NO: 160155 - DNA, 20 bp, Homo sapiens
  source 1..20: mol_type = genomic DNA
tttctggaaaaggttctttg

SEQ ID NO: 160156 - DNA, 20 bp, Homo sapiens
  source 1..20: mol_type = genomic DNA
ttctggaaaaggttctttgg

SEQ ID NO: 160157 - DNA, 20 bp, Homo sapiens
  source 1..20: mol_type = genomic DNA
tctggaaaaggttctttggc

SEQ ID NO: 160158 - DNA, 20 bp, Homo sapiens
  source 1..20: mol_type = genomic DNA
ctggaaaaggttctttggca

SEQ ID NO: 160159 - DNA, 20 bp, Homo sapiens
  source 1..20: mol_type = genomic DNA
tggaaaaggttctttggcat

SEQ ID NO: 160160 - DNA, 20 bp, Homo sapiens
  source 1..20: mol_type = genomic DNA
ggaaaaggttctttggcatt

SEQ ID NO: 160161 - DNA, 20 bp, Homo sapiens
  source 1..20: mol_type = genomic DNA
gaaaaggttctttggcattt

SEQ ID NO: 160162 - DNA, 20 bp, Homo sapiens
  source 1..20: mol_type = genomic DNA
aaaaggttctttggcatttg

SEQ ID NO: 160163 - DNA, 20 bp, Homo sapiens
  source 1..20: mol_type = genomic DNA
aaaggttctttggcatttga

SEQ ID NO: 160164 - DNA, 20 bp, Homo sapiens
  source 1..20: mol_type = genomic DNA
aaggttctttggcatttgac

SEQ ID NO: 160165 - DNA, 20 bp, Homo sapiens
  source 1..20: mol_type = genomic DNA
aggttctttggcatttgact

SEQ ID NO: 160166 - DNA, 20 bp, Homo sapiens
  source 1..20: mol_type = genomic DNA
ggttctttggcatttgactc

SEQ ID NO: 160167 - DNA, 20 bp, Homo sapiens
  source 1..20: mol_type = genomic DNA
gttctttggcatttgactcc

SEQ ID NO: 160168 - DNA, 20 bp, Homo sapiens
  source 1..20: mol_type = genomic DNA
ttctttggcatttgactcca

SEQ ID NO: 160169 - DNA, 20 bp, Homo sapiens
  source 1..20: mol_type = genomic DNA
tctttggcatttgactccat

SEQ ID NO: 160170 - DNA, 20 bp, Homo sapiens
  source 1..20: mol_type = genomic DNA
ctttggcatttgactccatt

SEQ ID NO: 160171 - DNA, 20 bp, Homo sapiens
  source 1..20: mol_type = genomic DNA
tttggcatttgactccattt

SEQ ID NO: 160172 - DNA, 20 bp, Homo sapiens
  source 1..20: mol_type = genomic DNA
ttggcatttgactccatttt

SEQ ID NO: 160173 - DNA, 20 bp, Homo sapiens
  source 1..20: mol_type = genomic DNA
tggcatttgactccattttg

SEQ ID NO: 160174 - DNA, 20 bp, Homo sapiens
  source 1..20: mol_type = genomic DNA
ggcatttgactccattttgc

SEQ ID NO: 160175 - DNA, 20 bp, Homo sapiens
  source 1..20: mol_type = genomic DNA
gcatttgactccattttgct

SEQ ID NO: 160176 - DNA, 20 bp, Homo sapiens
  source 1..20: mol_type = genomic DNA
catttgactccattttgctg

SEQ ID NO: 160177 - DNA, 20 bp, Homo sapiens
  source 1..20: mol_type = genomic DNA
atttgactccattttgctgt

SEQ ID NO: 160178 - DNA, 20 bp, Homo sapiens
  source 1..20: mol_type = genomic DNA
tttgactccattttgctgtt

SEQ ID NO: 160179 - DNA, 20 bp, Homo sapiens
  source 1..20: mol_type = genomic DNA
ttgactccattttgctgttt

SEQ ID NO: 160180 - DNA, 20 bp, Homo sapiens
  source 1..20: mol_type = genomic DNA
tgactccattttgctgtttc

SEQ ID NO: 160181 - DNA, 20 bp, Homo sapiens
  source 1..20: mol_type = genomic DNA
gactccattttgctgtttca

SEQ ID NO: 160182 - DNA, 20 bp, Homo sapiens
  source 1..20: mol_type = genomic DNA
actccattttgctgtttcat

SEQ ID NO: 160183 - DNA, 20 bp, Homo sapiens
  source 1..20: mol_type = genomic DNA
ctccattttgctgtttcatt

SEQ ID NO: 160184 - DNA, 20 bp, Homo sapiens
  source 1..20: mol_type = genomic DNA
tccattttgctgtttcattt

SEQ ID NO: 160185 - DNA, 20 bp, Homo sapiens
  source 1..20: mol_type = genomic DNA
ccattttgctgtttcatttg

SEQ ID NO: 160186 - DNA, 20 bp, Homo sapiens
  source 1..20: mol_type = genomic DNA
cattttgctgtttcatttgt

SEQ ID NO: 160187 - DNA, 20 bp, Homo sapiens
  source 1..20: mol_type = genomic DNA
attttgctgtttcatttgtc

SEQ ID NO: 160188 - DNA, 20 bp, Homo sapiens
  source 1..20: mol_type = genomic DNA
ttttgctgtttcatttgtca

SEQ ID NO: 160189 - DNA, 20 bp, Homo sapiens
  source 1..20: mol_type = genomic DNA
tttgctgtttcatttgtcag

SEQ ID NO: 160190 - DNA, 20 bp, Homo sapiens
  source 1..20: mol_type = genomic DNA
ttgctgtttcatttgtcaga

SEQ ID NO: 160191 - DNA, 20 bp, Homo sapiens
  source 1..20: mol_type = genomic DNA
tgctgtttcatttgtcagac

SEQ ID NO: 160192 - DNA, 20 bp, Homo sapiens
  source 1..20: mol_type = genomic DNA
gctgtttcatttgtcagact

SEQ ID NO: 160193 - DNA, 20 bp, Homo sapiens
  source 1..20: mol_type = genomic DNA
ctgtttcatttgtcagactt

SEQ ID NO: 160194 - DNA, 20 bp, Homo sapiens
  source 1..20: mol_type = genomic DNA
tgtttcatttgtcagacttc

SEQ ID NO: 160195 - DNA, 20 bp, Homo sapiens
  source 1..20: mol_type = genomic DNA
gtttcatttgtcagacttct

SEQ ID NO: 160196 - DNA, 20 bp, Homo sapiens
  source 1..20: mol_type = genomic DNA
tttcatttgtcagacttctt

SEQ ID NO: 160197 - DNA, 20 bp, Homo sapiens
  source 1..20: mol_type = genomic DNA
ttcatttgtcagacttcttt

SEQ ID NO: 160198 - DNA, 20 bp, Homo sapiens
  source 1..20: mol_type = genomic DNA
tcatttgtcagacttctttt

SEQ ID NO: 160199 - DNA, 20 bp, Homo sapiens
  source 1..20: mol_type = genomic DNA
catttgtcagacttcttttt

SEQ ID NO: 160200 - DNA, 20 bp, Homo sapiens
  source 1..20: mol_type = genomic DNA
atttgtcagacttctttttg

SEQ ID NO: 160201 - DNA, 20 bp, Homo sapiens
  source 1..20: mol_type = genomic DNA
tttgtcagacttctttttgt

SEQ ID NO: 160202 - DNA, 20 bp, Homo sapiens
  source 1..20: mol_type = genomic DNA
ttgtcagacttctttttgtc

SEQ ID NO: 160203 - DNA, 20 bp, Homo sapiens
  source 1..20: mol_type = genomic DNA
tgtcagacttctttttgtcc

SEQ ID NO: 160204 - DNA, 20 bp, Homo sapiens
  source 1..20: mol_type = genomic DNA
gtcagacttctttttgtccc

SEQ ID NO: 160205 - DNA, 20 bp, Homo sapiens
  source 1..20: mol_type = genomic DNA
tcagacttctttttgtccct

SEQ ID NO: 160206 - DNA, 20 bp, Homo sapiens
  source 1..20: mol_type = genomic DNA
cagacttctttttgtccctc

SEQ ID NO: 160207 - DNA, 20 bp, Homo sapiens
  source 1..20: mol_type = genomic DNA
agacttctttttgtccctct

SEQ ID NO: 160208 - DNA, 20 bp, Homo sapiens
  source 1..20: mol_type = genomic DNA
gacttctttttgtccctctt

SEQ ID NO: 160209 - DNA, 20 bp, Homo sapiens
  source 1..20: mol_type = genomic DNA
acttctttttgtccctcttt

SEQ ID NO: 160210 - DNA, 20 bp, Homo sapiens
  source 1..20: mol_type = genomic DNA
cttctttttgtccctcttta

SEQ ID NO: 160211 - DNA, 20 bp, Homo sapiens
  source 1..20: mol_type = genomic DNA
ttctttttgtccctctttac

SEQ ID NO: 160212 - DNA, 20 bp, Homo sapiens
  source 1..20: mol_type = genomic DNA
tctttttgtccctctttact

SEQ ID NO: 160213 - DNA, 20 bp, Homo sapiens
  source 1..20: mol_type = genomic DNA
ctttttgtccctctttactt

SEQ ID NO: 160214 - DNA, 20 bp, Homo sapiens
  source 1..20: mol_type = genomic DNA
tttttgtccctctttacttc

SEQ ID NO: 160215 - DNA, 20 bp, Homo sapiens
  source 1..20: mol_type = genomic DNA
ttttgtccctctttacttct

SEQ ID NO: 160216 - DNA, 20 bp, Homo sapiens
  source 1..20: mol_type = genomic DNA
tttgtccctctttacttctc

SEQ ID NO: 160217 - DNA, 20 bp, Homo sapiens
  source 1..20: mol_type = genomic DNA
ttgtccctctttacttctcc

SEQ ID NO: 160218 - DNA, 20 bp, Homo sapiens
  source 1..20: mol_type = genomic DNA
tgtccctctttacttctccc

SEQ ID NO: 160219 - DNA, 20 bp, Homo sapiens
  source 1..20: mol_type = genomic DNA
gtccctctttacttctcccc

SEQ ID NO: 160220 - DNA, 20 bp, Homo sapiens
  source 1..20: mol_type = genomic DNA
tccctctttacttctcccca

SEQ ID NO: 160221 - DNA, 20 bp, Homo sapiens
  source 1..20: mol_type = genomic DNA
ccctctttacttctccccac

SEQ ID NO: 160222 - DNA, 20 bp, Homo sapiens
  source 1..20: mol_type = genomic DNA
cctctttacttctccccaca

SEQ ID NO: 160223 - DNA, 20 bp, Homo sapiens
  source 1..20: mol_type = genomic DNA
ctctttacttctccccacat

SEQ ID NO: 160224 - DNA, 20 bp, Homo sapiens
  source 1..20: mol_type = genomic DNA
tctttacttctccccacata

SEQ ID NO: 160225 - DNA, 20 bp, Homo sapiens
  source 1..20: mol_type = genomic DNA
ctttacttctccccacataa

SEQ ID NO: 160226 - DNA, 20 bp, Homo sapiens
  source 1..20: mol_type = genomic DNA
tttacttctccccacataat

SEQ ID NO: 160227 - DNA, 20 bp, Homo sapiens
  source 1..20: mol_type = genomic DNA
ttacttctccccacataatt

SEQ ID NO: 160228 - DNA, 20 bp, Homo sapiens
  source 1..20: mol_type = genomic DNA
tacttctccccacataattc

SEQ ID NO: 160229 - DNA, 20 bp, Homo sapiens
  source 1..20: mol_type = genomic DNA
acttctccccacataattca

SEQ ID NO: 160230 - DNA, 20 bp, Homo sapiens
  source 1..20: mol_type = genomic DNA
cttctccccacataattcac

SEQ ID NO: 160231 - DNA, 20 bp, Homo sapiens
  source 1..20: mol_type = genomic DNA
ttctccccacataattcacc

SEQ ID NO: 160232 - DNA, 20 bp, Homo sapiens
  source 1..20: mol_type = genomic DNA
tctccccacataattcacca

SEQ ID NO: 160233 - DNA, 20 bp, Homo sapiens
  source 1..20: mol_type = genomic DNA
ctccccacataattcaccag

SEQ ID NO: 160234 - DNA, 20 bp, Homo sapiens
  source 1..20: mol_type = genomic DNA
tccccacataattcaccagt

SEQ ID NO: 160235 - DNA, 20 bp, Homo sapiens
  source 1..20: mol_type = genomic DNA
ccccacataattcaccagta

SEQ ID NO: 160236 - DNA, 20 bp, Homo sapiens
  source 1..20: mol_type = genomic DNA
cccacataattcaccagtac

SEQ ID NO: 160237 - DNA, 20 bp, Homo sapiens
  source 1..20: mol_type = genomic DNA
ccacataattcaccagtact

SEQ ID NO: 160238 - DNA, 20 bp, Homo sapiens
  source 1..20: mol_type = genomic DNA
cacataattcaccagtacta

SEQ ID NO: 160239 - DNA, 20 bp, Homo sapiens
  source 1..20: mol_type = genomic DNA
acataattcaccagtactag

SEQ ID NO: 160240 - DNA, 20 bp, Homo sapiens
  source 1..20: mol_type = genomic DNA
cataattcaccagtactagt

SEQ ID NO: 160241 - DNA, 20 bp, Homo sapiens
  source 1..20: mol_type = genomic DNA
ataattcaccagtactagtg

SEQ ID NO: 160242 - DNA, 20 bp, Homo sapiens
  source 1..20: mol_type = genomic DNA
taattcaccagtactagtgt

SEQ ID NO: 160243 - DNA, 20 bp, Homo sapiens
  source 1..20: mol_type = genomic DNA
aattcaccagtactagtgtt

SEQ ID NO: 160244 - DNA, 20 bp, Homo sapiens
  source 1..20: mol_type = genomic DNA
attcaccagtactagtgttt

SEQ ID NO: 160245 - DNA, 20 bp, Homo sapiens
  source 1..20: mol_type = genomic DNA
ttcaccagtactagtgtttt

SEQ ID NO: 160246 - DNA, 20 bp, Homo sapiens
  source 1..20: mol_type = genomic DNA
tcaccagtactagtgttttg

SEQ ID NO: 160247 - DNA, 20 bp, Homo sapiens
  source 1..20: mol_type = genomic DNA
caccagtactagtgttttgt

SEQ ID NO: 160248 - DNA, 20 bp, Homo sapiens
  source 1..20: mol_type = genomic DNA
accagtactagtgttttgtt

SEQ ID NO: 160249 - DNA, 20 bp, Homo sapiens
  source 1..20: mol_type = genomic DNA
ccagtactagtgttttgttt

SEQ ID NO: 160250 - DNA, 20 bp, Homo sapiens
  source 1..20: mol_type = genomic DNA
cagtactagtgttttgtttt

SEQ ID NO: 160251 - DNA, 20 bp, Homo sapiens
  source 1..20: mol_type = genomic DNA
agtactagtgttttgttttt

SEQ ID NO: 160252 - DNA, 20 bp, Homo sapiens
  source 1..20: mol_type = genomic DNA
gtactagtgttttgtttttc

SEQ ID NO: 160253 - DNA, 20 bp, Homo sapiens
  source 1..20: mol_type = genomic DNA
tactagtgttttgtttttca

SEQ ID NO: 160254 - DNA, 20 bp, Homo sapiens
  source 1..20: mol_type = genomic DNA
actagtgttttgtttttcag

SEQ ID NO: 160255 - DNA, 20 bp, Homo sapiens
  source 1..20: mol_type = genomic DNA
ctagtgttttgtttttcaga

SEQ ID NO: 160256 - DNA, 20 bp, Homo sapiens
  source 1..20: mol_type = genomic DNA
tagtgttttgtttttcagac

SEQ ID NO: 160257 - DNA, 20 bp, Homo sapiens
  source 1..20: mol_type = genomic DNA
agtgttttgtttttcagacc

SEQ ID NO: 160258 - DNA, 20 bp, Homo sapiens
  source 1..20: mol_type = genomic DNA
gtgttttgtttttcagacca

SEQ ID NO: 160259 - DNA, 20 bp, Homo sapiens
  source 1..20: mol_type = genomic DNA
tgttttgtttttcagaccaa

SEQ ID NO: 160260 - DNA, 20 bp, Homo sapiens
  source 1..20: mol_type = genomic DNA
gttttgtttttcagaccaag

SEQ ID NO: 160261 - DNA, 20 bp, Homo sapiens
  source 1..20: mol_type = genomic DNA
ttttgtttttcagaccaagt

SEQ ID NO: 160262 - DNA, 20 bp, Homo sapiens
  source 1..20: mol_type = genomic DNA
tttgtttttcagaccaagtc

SEQ ID NO: 160263 - DNA, 20 bp, Homo sapiens
  source 1..20: mol_type = genomic DNA
ttgtttttcagaccaagtct

SEQ ID NO: 160264 - DNA, 20 bp, Homo sapiens
  source 1..20: mol_type = genomic DNA
tgtttttcagaccaagtctc

SEQ ID NO: 160265 - DNA, 20 bp, Homo sapiens
  source 1..20: mol_type = genomic DNA
gtttttcagaccaagtctcg

SEQ ID NO: 160266 - DNA, 20 bp, Homo sapiens
  source 1..20: mol_type = genomic DNA
tttttcagaccaagtctcgc

SEQ ID NO: 160267 - DNA, 20 bp, Homo sapiens
  source 1..20: mol_type = genomic DNA
ttttcagaccaagtctcgct

SEQ ID NO: 160268 - DNA, 20 bp, Homo sapiens
  source 1..20: mol_type = genomic DNA
tttcagaccaagtctcgctc

SEQ ID NO: 160269 - DNA, 20 bp, Homo sapiens
  source 1..20: mol_type = genomic DNA
ttcagaccaagtctcgctct

SEQ ID NO: 160270 - DNA, 20 bp, Homo sapiens
  source 1..20: mol_type = genomic DNA
tcagaccaagtctcgctctg

SEQ ID NO: 160271 - DNA, 20 bp, Homo sapiens
  source 1..20: mol_type = genomic DNA
cagaccaagtctcgctctgt

SEQ ID NO: 160272 - DNA, 20 bp, Homo sapiens
  source 1..20: mol_type = genomic DNA
agaccaagtctcgctctgtc

SEQ ID NO: 160273 - DNA, 20 bp, Homo sapiens
  source 1..20: mol_type = genomic DNA
gaccaagtctcgctctgtcg

SEQ ID NO: 160274 - DNA, 20 bp, Homo sapiens
  source 1..20: mol_type = genomic DNA
accaagtctcgctctgtcgc

SEQ ID NO: 160275 - DNA, 20 bp, Homo sapiens
  source 1..20: mol_type = genomic DNA
ccaagtctcgctctgtcgcc

SEQ ID NO: 160276 - DNA, 20 bp, Homo sapiens
  source 1..20: mol_type = genomic DNA
caagtctcgctctgtcgccc

SEQ ID NO: 160277 - DNA, 20 bp, Homo sapiens
  source 1..20: mol_type = genomic DNA
aagtctcgctctgtcgccca

SEQ ID NO: 160278 - DNA, 20 bp, Homo sapiens
  source 1..20: mol_type = genomic DNA
agtctcgctctgtcgcccag

SEQ ID NO: 160279 - DNA, 20 bp, Homo sapiens
  source 1..20: mol_type = genomic DNA
gtctcgctctgtcgcccagg

SEQ ID NO: 160280 - DNA, 20 bp, Homo sapiens
  source 1..20: mol_type = genomic DNA
tctcgctctgtcgcccaggc

SEQ ID NO: 160281 - DNA, 20 bp, Homo sapiens
  source 1..20: mol_type = genomic DNA
ctcgctctgtcgcccaggct

SEQ ID NO: 160282 - DNA, 20 bp, Homo sapiens
  source 1..20: mol_type = genomic DNA
tcgctctgtcgcccaggctg

SEQ ID NO: 160283 - DNA, 20 bp, Homo sapiens
  source 1..20: mol_type = genomic DNA
cgctctgtcgcccaggctgg

SEQ ID NO: 160284 - DNA, 20 bp, Homo sapiens
  source 1..20: mol_type = genomic DNA
gctctgtcgcccaggctgga

SEQ ID NO: 160285 - DNA, 20 bp, Homo sapiens
  source 1..20: mol_type = genomic DNA
ctctgtcgcccaggctggag

SEQ ID NO: 160286 - DNA, 20 bp, Homo sapiens
  source 1..20: mol_type = genomic DNA
tctgtcgcccaggctggagt

SEQ ID NO: 160287 - DNA, 20 bp, Homo sapiens
  source 1..20: mol_type = genomic DNA
ctgtcgcccaggctggagtg

SEQ ID NO: 160288 - DNA, 20 bp, Homo sapiens
  source 1..20: mol_type = genomic DNA
tgtcgcccaggctggagtgc

SEQ ID NO: 160289 - DNA, 20 bp, Homo sapiens
  source 1..20: mol_type = genomic DNA
gtcgcccaggctggagtgca

SEQ ID NO: 160290 - DNA, 20 bp, Homo sapiens
  source 1..20: mol_type = genomic DNA
tcgcccaggctggagtgcag

SEQ ID NO: 160291 - DNA, 20 bp, Homo sapiens
  source 1..20: mol_type = genomic DNA
cgcccaggctggagtgcagt

SEQ ID NO: 160292 - DNA, 20 bp, Homo sapiens
  source 1..20: mol_type = genomic DNA
gcccaggctggagtgcagtg

SEQ ID NO: 160293 - DNA, 20 bp, Homo sapiens
  source 1..20: mol_type = genomic DNA
cccaggctggagtgcagtgg

SEQ ID NO: 160294 - DNA, 20 bp, Homo sapiens
  source 1..20: mol_type = genomic DNA
ccaggctggagtgcagtggc

SEQ ID NO: 160295 - DNA, 20 bp, Homo sapiens
  source 1..20: mol_type = genomic DNA
caggctggagtgcagtggcg

SEQ ID NO: 160296 - DNA, 20 bp, Homo sapiens
  source 1..20: mol_type = genomic DNA
aggctggagtgcagtggcgc

SEQ ID NO: 160297 - DNA, 20 bp, Homo sapiens
  source 1..20: mol_type = genomic DNA
ggctggagtgcagtggcgcg

SEQ ID NO: 160298 - DNA, 20 bp, Homo sapiens
  source 1..20: mol_type = genomic DNA
gctggagtgcagtggcgcga

SEQ ID NO: 160299 - DNA, 20 bp, Homo sapiens
  source 1..20: mol_type = genomic DNA
ctggagtgcagtggcgcgat

SEQ ID NO: 160300 - DNA, 20 bp, Homo sapiens
  source 1..20: mol_type = genomic DNA
tggagtgcagtggcgcgatc

SEQ ID NO: 160301 - DNA, 20 bp, Homo sapiens
  source 1..20: mol_type = genomic DNA
ggagtgcagtggcgcgatct

SEQ ID NO: 160302 - DNA, 20 bp, Homo sapiens
  source 1..20: mol_type = genomic DNA
gagtgcagtggcgcgatctc

SEQ ID NO: 160303 - DNA, 20 bp, Homo sapiens
  source 1..20: mol_type = genomic DNA
agtgcagtggcgcgatctca

SEQ ID NO: 160304 - DNA, 20 bp, Homo sapiens
  source 1..20: mol_type = genomic DNA
gtgcagtggcgcgatctcag

SEQ ID NO: 160305 - DNA, 20 bp, Homo sapiens
  source 1..20: mol_type = genomic DNA
tgcagtggcgcgatctcagc

SEQ ID NO: 160306 - DNA, 20 bp, Homo sapiens
  source 1..20: mol_type = genomic DNA
gcagtggcgcgatctcagct

SEQ ID NO: 160307 - DNA, 20 bp, Homo sapiens
  source 1..20: mol_type = genomic DNA
cagtggcgcgatctcagctc

SEQ ID NO: 160308 - DNA, 20 bp, Homo sapiens
  source 1..20: mol_type = genomic DNA
agtggcgcgatctcagctca

SEQ ID NO: 160309 - DNA, 20 bp, Homo sapiens
  source 1..20: mol_type = genomic DNA
gtggcgcgatctcagctcac

SEQ ID NO: 160310 - DNA, 20 bp, Homo sapiens
  source 1..20: mol_type = genomic DNA
tggcgcgatctcagctcact

SEQ ID NO: 160311 - DNA, 20 bp, Homo sapiens
  source 1..20: mol_type = genomic DNA
ggcgcgatctcagctcactg

SEQ ID NO: 160312 - DNA, 20 bp, Homo sapiens
  source 1..20: mol_type = genomic DNA
gcgcgatctcagctcactgc

SEQ ID NO: 160313 - DNA, 20 bp, Homo sapiens
  source 1..20: mol_type = genomic DNA
cgcgatctcagctcactgca

SEQ ID NO: 160314 - DNA, 20 bp, Homo sapiens
  source 1..20: mol_type = genomic DNA
gcgatctcagctcactgcaa

SEQ ID NO: 160315 - DNA, 20 bp, Homo sapiens
  source 1..20: mol_type = genomic DNA
cgatctcagctcactgcaac

SEQ ID NO: 160316 - DNA, 20 bp, Homo sapiens
  source 1..20: mol_type = genomic DNA
gatctcagctcactgcaacc

SEQ ID NO: 160317 - DNA, 20 bp, Homo sapiens
  source 1..20: mol_type = genomic DNA
atctcagctcactgcaacct

SEQ ID NO: 160318 - DNA, 20 bp, Homo sapiens
  source 1..20: mol_type = genomic DNA
tctcagctcactgcaacctc

SEQ ID NO: 160319 - DNA, 20 bp, Homo sapiens
  source 1..20: mol_type = genomic DNA
ctcagctcactgcaacctcc

SEQ ID NO: 160320 - DNA, 20 bp, Homo sapiens
  source 1..20: mol_type = genomic DNA
tcagctcactgcaacctccg

SEQ ID NO: 160321 - DNA, 20 bp, Homo sapiens
  source 1..20: mol_type = genomic DNA
cagctcactgcaacctccgc

SEQ ID NO: 160322 - DNA, 20 bp, Homo sapiens
  source 1..20: mol_type = genomic DNA
agctcactgcaacctccgcc

SEQ ID NO: 160323 - DNA, 20 bp, Homo sapiens
  source 1..20: mol_type = genomic DNA
gctcactgcaacctccgcct

SEQ ID NO: 160324 - DNA, 20 bp, Homo sapiens
  source 1..20: mol_type = genomic DNA
ctcactgcaacctccgcctc

SEQ ID NO: 160325 - DNA, 20 bp, Homo sapiens
  source 1..20: mol_type = genomic DNA
tcactgcaacctccgcctcc

SEQ ID NO: 160326 - DNA, 20 bp, Homo sapiens
  source 1..20: mol_type = genomic DNA
cactgcaacctccgcctccc

SEQ ID NO: 160327 - DNA, 20 bp, Homo sapiens
  source 1..20: mol_type = genomic DNA
actgcaacctccgcctccca

SEQ ID NO: 160328 - DNA, 20 bp, Homo sapiens
  source 1..20: mol_type = genomic DNA
ctgcaacctccgcctcccag

SEQ ID NO: 160329 - DNA, 20 bp, Homo sapiens
  source 1..20: mol_type = genomic DNA
tgcaacctccgcctcccagg

SEQ ID NO: 160330 - DNA, 20 bp, Homo sapiens
  source 1..20: mol_type = genomic DNA
gcaacctccgcctcccaggt

SEQ ID NO: 160331 - DNA, 20 bp, Homo sapiens
  source 1..20: mol_type = genomic DNA
caacctccgcctcccaggtt

SEQ ID NO: 160332 - DNA, 20 bp, Homo sapiens
  source 1..20: mol_type = genomic DNA
aacctccgcctcccaggttc

SEQ ID NO: 160333 - DNA, 20 bp, Homo sapiens
  source 1..20: mol_type = genomic DNA
acctccgcctcccaggttca

SEQ ID NO: 160334 - DNA, 20 bp, Homo sapiens
  source 1..20: mol_type = genomic DNA
cctccgcctcccaggttcaa

SEQ ID NO: 160335 - DNA, 20 bp, Homo sapiens
  source 1..20: mol_type = genomic DNA
ctccgcctcccaggttcaag

SEQ ID NO: 160336 - DNA, 20 bp, Homo sapiens
  source 1..20: mol_type = genomic DNA
tccgcctcccaggttcaagc

SEQ ID NO: 160337 - DNA, 20 bp, Homo sapiens
  source 1..20: mol_type = genomic DNA
ccgcctcccaggttcaagca

SEQ ID NO: 160338 - DNA, 20 bp, Homo sapiens
  source 1..20: mol_type = genomic DNA
cgcctcccaggttcaagcaa

SEQ ID NO: 160339 - DNA, 20 bp, Homo sapiens
  source 1..20: mol_type = genomic DNA
gcctcccaggttcaagcaat

SEQ ID NO: 160340 - DNA, 20 bp, Homo sapiens
  source 1..20: mol_type = genomic DNA
cctcccaggttcaagcaatt

SEQ ID NO: 160341 - DNA, 20 bp, Homo sapiens
  source 1..20: mol_type = genomic DNA
ctcccaggttcaagcaattc

SEQ ID NO: 160342 - DNA, 20 bp, Homo sapiens
  source 1..20: mol_type = genomic DNA
tcccaggttcaagcaattct

SEQ ID NO: 160343 - DNA, 20 bp, Homo sapiens
  source 1..20: mol_type = genomic DNA
cccaggttcaagcaattctc

SEQ ID NO: 160344 - DNA, 20 bp, Homo sapiens
  source 1..20: mol_type = genomic DNA
ccaggttcaagcaattctcc

SEQ ID NO: 160345 - DNA, 20 bp, Homo sapiens
  source 1..20: mol_type = genomic DNA
caggttcaagcaattctcct

SEQ ID NO: 160346 - DNA, 20 bp, Homo sapiens
  source 1..20: mol_type = genomic DNA
aggttcaagcaattctcctg

SEQ ID NO: 160347 - DNA, 20 bp, Homo sapiens
  source 1..20: mol_type = genomic DNA
ggttcaagcaattctcctgc

SEQ ID NO: 160348 - DNA, 20 bp, Homo sapiens
  source 1..20: mol_type = genomic DNA
gttcaagcaattctcctgcc

SEQ ID NO: 160349 - DNA, 20 bp, Homo sapiens
  source 1..20: mol_type = genomic DNA
ttcaagcaattctcctgcct

SEQ ID NO: 160350 - DNA, 20 bp, Homo sapiens
  source 1..20: mol_type = genomic DNA
tcaagcaattctcctgcctc

SEQ ID NO: 160351 - DNA, 20 bp, Homo sapiens
  source 1..20: mol_type = genomic DNA
caagcaattctcctgcctca

SEQ ID NO: 160352 - DNA, 20 bp, Homo sapiens
  source 1..20: mol_type = genomic DNA
aagcaattctcctgcctcag

SEQ ID NO: 160353 - DNA, 20 bp, Homo sapiens
  source 1..20: mol_type = genomic DNA
agcaattctcctgcctcagc

SEQ ID NO: 160354 - DNA, 20 bp, Homo sapiens
  source 1..20: mol_type = genomic DNA
gcaattctcctgcctcagcc

SEQ ID NO: 160355 - DNA, 20 bp, Homo sapiens
  source 1..20: mol_type = genomic DNA
caattctcctgcctcagcct

SEQ ID NO: 160356 - DNA, 20 bp, Homo sapiens
  source 1..20: mol_type = genomic DNA
aattctcctgcctcagcctc

SEQ ID NO: 160357 - DNA, 20 bp, Homo sapiens
  source 1..20: mol_type = genomic DNA
attctcctgcctcagcctcc

SEQ ID NO: 160358 - DNA, 20 bp, Homo sapiens
  source 1..20: mol_type = genomic DNA
ttctcctgcctcagcctccc

SEQ ID NO: 160359 - DNA, 20 bp, Homo sapiens
  source 1..20: mol_type = genomic DNA
tctcctgcctcagcctcccg

SEQ ID NO: 160360 - DNA, 20 bp, Homo sapiens
  source 1..20: mol_type = genomic DNA
ctcctgcctcagcctcccgg

SEQ ID NO: 160361 - DNA, 20 bp, Homo sapiens
  source 1..20: mol_type = genomic DNA
tcctgcctcagcctcccggg

SEQ ID NO: 160362 - DNA, 20 bp, Homo sapiens
  source 1..20: mol_type = genomic DNA
cctgcctcagcctcccgggt

SEQ ID NO: 160363 - DNA, 20 bp, Homo sapiens
  source 1..20: mol_type = genomic DNA
ctgcctcagcctcccgggta

SEQ ID NO: 160364 - DNA, 20 bp, Homo sapiens
  source 1..20: mol_type = genomic DNA
tgcctcagcctcccgggtag

SEQ ID NO: 160365 - DNA, 20 bp, Homo sapiens
  source 1..20: mol_type = genomic DNA
gcctcagcctcccgggtagc

SEQ ID NO: 160366 - DNA, 20 bp, Homo sapiens
  source 1..20: mol_type = genomic DNA
cctcagcctcccgggtagct

SEQ ID NO: 160367 - DNA, 20 bp, Homo sapiens
  source 1..20: mol_type = genomic DNA
ctcagcctcccgggtagctg

SEQ ID NO: 160368 - DNA, 20 bp, Homo sapiens
  source 1..20: mol_type = genomic DNA
tcagcctcccgggtagctgg

SEQ ID NO: 160369 - DNA, 20 bp, Homo sapiens
  source 1..20: mol_type = genomic DNA
cagcctcccgggtagctggg

SEQ ID NO: 160370 - DNA, 20 bp, Homo sapiens
  source 1..20: mol_type = genomic DNA
agcctcccgggtagctggga

SEQ ID NO: 160371 - DNA, 20 bp, Homo sapiens
  source 1..20: mol_type = genomic DNA
gcctcccgggtagctgggac

SEQ ID NO: 160372 - DNA, 20 bp, Homo sapiens
  source 1..20: mol_type = genomic DNA
cctcccgggtagctgggact

SEQ ID NO: 160373 - DNA, 20 bp, Homo sapiens
  source 1..20: mol_type = genomic DNA
ctcccgggtagctgggacta

SEQ ID NO: 160374 - DNA, 20 bp, Homo sapiens
  source 1..20: mol_type = genomic DNA
tcccgggtagctgggactac

SEQ ID NO: 160375 - DNA, 20 bp, Homo sapiens
  source 1..20: mol_type = genomic DNA
cccgggtagctgggactaca

SEQ ID NO: 160376 - DNA, 20 bp, Homo sapiens
  source 1..20: mol_type = genomic DNA
ccgggtagctgggactacag

SEQ ID NO: 160377 - DNA, 20 bp, Homo sapiens
  source 1..20: mol_type = genomic DNA
cgggtagctgggactacagg

SEQ ID NO: 160378 - DNA, 20 bp, Homo sapiens
  source 1..20: mol_type = genomic DNA
gggtagctgggactacaggc

SEQ ID NO: 160379 - DNA, 20 bp, Homo sapiens
  source 1..20: mol_type = genomic DNA
ggtagctgggactacaggcg

SEQ ID NO: 160380 - DNA, 20 bp, Homo sapiens
  source 1..20: mol_type = genomic DNA
gtagctgggactacaggcgc

SEQ ID NO: 160381 - DNA, 20 bp, Homo sapiens
  source 1..20: mol_type = genomic DNA
tagctgggactacaggcgcg

SEQ ID NO: 160382 - DNA, 20 bp, Homo sapiens
  source 1..20: mol_type = genomic DNA
agctgggactacaggcgcgc

SEQ ID NO: 160383 - DNA, 20 bp, Homo sapiens
  source 1..20: mol_type = genomic DNA
gctgggactacaggcgcgcg

SEQ ID NO: 160384 - DNA, 20 bp, Homo sapiens
  source 1..20: mol_type = genomic DNA
ctgggactacaggcgcgcgc

SEQ ID NO: 160385 - DNA, 20 bp, Homo sapiens
  source 1..20: mol_type = genomic DNA
tgggactacaggcgcgcgcc

SEQ ID NO: 160386 - DNA, 20 bp, Homo sapiens
  source 1..20: mol_type = genomic DNA
gggactacaggcgcgcgccg

SEQ ID NO: 160387 - DNA, 20 bp, Homo sapiens
  source 1..20: mol_type = genomic DNA
ggactacaggcgcgcgccgc

SEQ ID NO: 160388 - DNA, 20 bp, Homo sapiens
  source 1..20: mol_type = genomic DNA
gactacaggcgcgcgccgcc

SEQ ID NO: 160389 - DNA, 20 bp, Homo sapiens
  source 1..20: mol_type = genomic DNA
actacaggcgcgcgccgcca

SEQ ID NO: 160390 - DNA, 20 bp, Homo sapiens
  source 1..20: mol_type = genomic DNA
ctacaggcgcgcgccgccac

SEQ ID NO: 160391 - DNA, 20 bp, Homo sapiens
  source 1..20: mol_type = genomic DNA
tacaggcgcgcgccgccacg

SEQ ID NO: 160392 - DNA, 20 bp, Homo sapiens
  source 1..20: mol_type = genomic DNA
acaggcgcgcgccgccacgc

SEQ ID NO: 160393 - DNA, 20 bp, Homo sapiens
  source 1..20: mol_type = genomic DNA
caggcgcgcgccgccacgcc

SEQ ID NO: 160394 - DNA, 20 bp, Homo sapiens
  source 1..20: mol_type = genomic DNA
aggcgcgcgccgccacgcct

SEQ ID NO: 160395 - DNA, 20 bp, Homo sapiens
  source 1..20: mol_type = genomic DNA
ggcgcgcgccgccacgcctg

SEQ ID NO: 160396 - DNA, 20 bp, Homo sapiens
  source 1..20: mol_type = genomic DNA
gcgcgcgccgccacgcctgg

SEQ ID NO: 160397 - DNA, 20 bp, Homo sapiens
  source 1..20: mol_type = genomic DNA
cgcgcgccgccacgcctggc

SEQ ID NO: 160398 - DNA, 20 bp, Homo sapiens
  source 1..20: mol_type = genomic DNA
gcgcgccgccacgcctggct

SEQ ID NO: 160399 - DNA, 20 bp, Homo sapiens
  source 1..20: mol_type = genomic DNA
cgcgccgccacgcctggcta

SEQ ID NO: 160400 - DNA, 20 bp, Homo sapiens
  source 1..20: mol_type = genomic DNA
gcgccgccacgcctggctaa

SEQ ID NO: 160401 - DNA, 20 bp, Homo sapiens
  source 1..20: mol_type = genomic DNA
cgccgccacgcctggctaat

SEQ ID NO: 160402 - DNA, 20 bp, Homo sapiens
  source 1..20: mol_type = genomic DNA
gccgccacgcctggctaatt

SEQ ID NO: 160403 - DNA, 20 bp, Homo sapiens
  source 1..20: mol_type = genomic DNA
ccgccacgcctggctaattt

SEQ ID NO: 160404 - DNA, 20 bp, Homo sapiens
  source 1..20: mol_type = genomic DNA
cgccacgcctggctaatttt

SEQ ID NO: 160405 - DNA, 20 bp, Homo sapiens
  source 1..20: mol_type = genomic DNA
gccacgcctggctaattttt

SEQ ID NO: 160406 - DNA, 20 bp, Homo sapiens
  source 1..20: mol_type = genomic DNA
ccacgcctggctaatttttt

SEQ ID NO: 160407 - DNA, 20 bp, Homo sapiens
  source 1..20: mol_type = genomic DNA
cacgcctggctaatttttta

SEQ ID NO: 160408 - DNA, 20 bp, Homo sapiens
  source 1..20: mol_type = genomic DNA
acgcctggctaattttttat

SEQ ID NO: 160409 - DNA, 20 bp, Homo sapiens
  source 1..20: mol_type = genomic DNA
cgcctggctaattttttata

SEQ ID NO: 160410 - DNA, 20 bp, Homo sapiens
  source 1..20: mol_type = genomic DNA
gcctggctaattttttatat

SEQ ID NO: 160411 - DNA, 20 bp, Homo sapiens
  source 1..20: mol_type = genomic DNA
cctggctaattttttatatt

SEQ ID NO: 160412 - DNA, 20 bp, Homo sapiens
  source 1..20: mol_type = genomic DNA
ctggctaattttttatattt

SEQ ID NO: 160413 - DNA, 20 bp, Homo sapiens
  source 1..20: mol_type = genomic DNA
tggctaattttttatatttt

SEQ ID NO: 160414 - DNA, 20 bp, Homo sapiens
  source 1..20: mol_type = genomic DNA
ggctaattttttatatttta

SEQ ID NO: 160415 - DNA, 20 bp, Homo sapiens
  source 1..20: mol_type = genomic DNA
gctaattttttatattttag

SEQ ID NO: 160416 - DNA, 20 bp, Homo sapiens
  source 1..20: mol_type = genomic DNA
ctaattttttatattttagt

SEQ ID NO: 160417 - DNA, 20 bp, Homo sapiens
  source 1..20: mol_type = genomic DNA
taattttttatattttagta

SEQ ID NO: 160418 - DNA, 20 bp, Homo sapiens
  source 1..20: mol_type = genomic DNA
aattttttatattttagtag

SEQ ID NO: 160419 - DNA, 20 bp, Homo sapiens
  source 1..20: mol_type = genomic DNA
attttttatattttagtaga

SEQ ID NO: 160420 - DNA, 20 bp, Homo sapiens
  source 1..20: mol_type = genomic DNA
ttttttatattttagtagag

SEQ ID NO: 160421 - DNA, 20 bp, Homo sapiens
  source 1..20: mol_type = genomic DNA
tttttatattttagtagaga

SEQ ID NO: 160422 - DNA, 20 bp, Homo sapiens
  source 1..20: mol_type = genomic DNA
ttttatattttagtagagac

SEQ ID NO: 160423 - DNA, 20 bp, Homo sapiens
  source 1..20: mol_type = genomic DNA
tttatattttagtagagacg

SEQ ID NO: 160424 - DNA, 20 bp, Homo sapiens
  source 1..20: mol_type = genomic DNA
ttatattttagtagagacgg

SEQ ID NO: 160425 - DNA, 20 bp, Homo sapiens
  source 1..20: mol_type = genomic DNA
tatattttagtagagacggc

SEQ ID NO: 160426 - DNA, 20 bp, Homo sapiens
  source 1..20: mol_type = genomic DNA
atattttagtagagacggcg

SEQ ID NO: 160427 - DNA, 20 bp, Homo sapiens
  source 1..20: mol_type = genomic DNA
tattttagtagagacggcgt

SEQ ID NO: 160428 - DNA, 20 bp, Homo sapiens
  source 1..20: mol_type = genomic DNA
attttagtagagacggcgtt

SEQ ID NO: 160429 - DNA, 20 bp, Homo sapiens
  source 1..20: mol_type = genomic DNA
ttttagtagagacggcgttt

SEQ ID NO: 160430 - DNA, 20 bp, Homo sapiens
  source 1..20: mol_type = genomic DNA
tttagtagagacggcgtttc

SEQ ID NO: 160431 - DNA, 20 bp, Homo sapiens
  source 1..20: mol_type = genomic DNA
ttagtagagacggcgtttca

SEQ ID NO: 160432 - DNA, 20 bp, Homo sapiens
  source 1..20: mol_type = genomic DNA
tagtagagacggcgtttcac

SEQ ID NO: 160433 - DNA, 20 bp, Homo sapiens
  source 1..20: mol_type = genomic DNA
agtagagacggcgtttcacc

SEQ ID NO: 160434 - DNA, 20 bp, Homo sapiens
  source 1..20: mol_type = genomic DNA
gtagagacggcgtttcacca

SEQ ID NO: 160435 - DNA, 20 bp, Homo sapiens
  source 1..20: mol_type = genomic DNA
tagagacggcgtttcaccat

SEQ ID NO: 160436 - DNA, 20 bp, Homo sapiens
  source 1..20: mol_type = genomic DNA
agagacggcgtttcaccatg

SEQ ID NO: 160437 - DNA, 20 bp, Homo sapiens
  source 1..20: mol_type = genomic DNA
gagacggcgtttcaccatgt

SEQ ID NO: 160438 - DNA, 20 bp, Homo sapiens
  source 1..20: mol_type = genomic DNA
agacggcgtttcaccatgtt

SEQ ID NO: 160439 - DNA, 20 bp, Homo sapiens
  source 1..20: mol_type = genomic DNA
gacggcgtttcaccatgttg

SEQ ID NO: 160440 - DNA, 20 bp, Homo sapiens
  source 1..20: mol_type = genomic DNA
acggcgtttcaccatgttgg

SEQ ID NO: 160441 - DNA, 20 bp, Homo sapiens
  source 1..20: mol_type = genomic DNA
cggcgtttcaccatgttggc

SEQ ID NO: 160442 - DNA, 20 bp, Homo sapiens
  source 1..20: mol_type = genomic DNA
ggcgtttcaccatgttggcc

SEQ ID NO: 160443 - DNA, 20 bp, Homo sapiens
  source 1..20: mol_type = genomic DNA
gcgtttcaccatgttggcca

SEQ ID NO: 160444 - DNA, 20 bp, Homo sapiens
  source 1..20: mol_type = genomic DNA
cgtttcaccatgttggccag

SEQ ID NO: 160445 - DNA, 20 bp, Homo sapiens
  source 1..20: mol_type = genomic DNA
gtttcaccatgttggccagg

SEQ ID NO: 160446 - DNA, 20 bp, Homo sapiens
  source 1..20: mol_type = genomic DNA
tttcaccatgttggccagga

SEQ ID NO: 160447 - DNA, 20 bp, Homo sapiens
  source 1..20: mol_type = genomic DNA
ttcaccatgttggccaggat

SEQ ID NO: 160448 - DNA, 20 bp, Homo sapiens
  source 1..20: mol_type = genomic DNA
tcaccatgttggccaggatg

SEQ ID NO: 160449 - DNA, 20 bp, Homo sapiens
  source 1..20: mol_type = genomic DNA
caccatgttggccaggatgg

SEQ ID NO: 160450 - DNA, 20 bp, Homo sapiens
  source 1..20: mol_type = genomic DNA
accatgttggccaggatggt

SEQ ID NO: 160451 - DNA, 20 bp, Homo sapiens
  source 1..20: mol_type = genomic DNA
ccatgttggccaggatggtc

SEQ ID NO: 160452 - DNA, 20 bp, Homo sapiens
  source 1..20: mol_type = genomic DNA
catgttggccaggatggtct

SEQ ID NO: 160453 - DNA, 20 bp, Homo sapiens
  source 1..20: mol_type = genomic DNA
atgttggccaggatggtctc

SEQ ID NO: 160454 - DNA, 20 bp, Homo sapiens
  source 1..20: mol_type = genomic DNA
tgttggccaggatggtctcg

SEQ ID NO: 160455 - DNA, 20 bp, Homo sapiens
  source 1..20: mol_type = genomic DNA
gttggccaggatggtctcga

SEQ ID NO: 160456 - DNA, 20 bp, Homo sapiens
  source 1..20: mol_type = genomic DNA
ttggccaggatggtctcgat

SEQ ID NO: 160457 - DNA, 20 bp, Homo sapiens
  source 1..20: mol_type = genomic DNA
tggccaggatggtctcgatc

SEQ ID NO: 160458 - DNA, 20 bp, Homo sapiens
  source 1..20: mol_type = genomic DNA
ggccaggatggtctcgatct

SEQ ID NO: 160459 - DNA, 20 bp, Homo sapiens
  source 1..20: mol_type = genomic DNA
gccaggatggtctcgatctg

SEQ ID NO: 160460 - DNA, 20 bp, Homo sapiens
  source 1..20: mol_type = genomic DNA
ccaggatggtctcgatctgt

SEQ ID NO: 160461 - DNA, 20 bp, Homo sapiens
  source 1..20: mol_type = genomic DNA
caggatggtctcgatctgtt

SEQ ID NO: 160462 - DNA, 20 bp, Homo sapiens
  source 1..20: mol_type = genomic DNA
aggatggtctcgatctgttg

SEQ ID NO: 160463 - DNA, 20 bp, Homo sapiens
  source 1..20: mol_type = genomic DNA
ggatggtctcgatctgttga

SEQ ID NO: 160464 - DNA, 20 bp, Homo sapiens
  source 1..20: mol_type = genomic DNA
gatggtctcgatctgttgac

SEQ ID NO: 160465 - DNA, 20 bp, Homo sapiens
  source 1..20: mol_type = genomic DNA
atggtctcgatctgttgacg

SEQ ID NO: 160466 - DNA, 20 bp, Homo sapiens
  source 1..20: mol_type = genomic DNA
tggtctcgatctgttgacgt

SEQ ID NO: 160467 - DNA, 20 bp, Homo sapiens
  source 1..20: mol_type = genomic DNA
ggtctcgatctgttgacgtc

SEQ ID NO: 160468 - DNA, 20 bp, Homo sapiens
  source 1..20: mol_type = genomic DNA
gtctcgatctgttgacgtcg

SEQ ID NO: 160469 - DNA, 20 bp, Homo sapiens
  source 1..20: mol_type = genomic DNA
tctcgatctgttgacgtcgt

SEQ ID NO: 160470 - DNA, 20 bp, Homo sapiens
  source 1..20: mol_type = genomic DNA
ctcgatctgttgacgtcgtg

SEQ ID NO: 160471 - DNA, 20 bp, Homo sapiens
  source 1..20: mol_type = genomic DNA
tcgatctgttgacgtcgtga

SEQ ID NO: 160472 - DNA, 20 bp, Homo sapiens
  source 1..20: mol_type = genomic DNA
cgatctgttgacgtcgtgat

SEQ ID NO: 160473 - DNA, 20 bp, Homo sapiens
  source 1..20: mol_type = genomic DNA
gatctgttgacgtcgtgatc

SEQ ID NO: 160474 - DNA, 20 bp, Homo sapiens
  source 1..20: mol_type = genomic DNA
atctgttgacgtcgtgatcc

SEQ ID NO: 160475 - DNA, 20 bp, Homo sapiens
  source 1..20: mol_type = genomic DNA
tctgttgacgtcgtgatcca

SEQ ID NO: 160476 - DNA, 20 bp, Homo sapiens
  source 1..20: mol_type = genomic DNA
ctgttgacgtcgtgatccac

SEQ ID NO: 160477 - DNA, 20 bp, Homo sapiens
  source 1..20: mol_type = genomic DNA
tgttgacgtcgtgatccacc

SEQ ID NO: 160478 - DNA, 20 bp, Homo sapiens
  source 1..20: mol_type = genomic DNA
gttgacgtcgtgatccaccc

SEQ ID NO: 160479 - DNA, 20 bp, Homo sapiens
  source 1..20: mol_type = genomic DNA
ttgacgtcgtgatccacccg

SEQ ID NO: 160480 - DNA, 20 bp, Homo sapiens
  source 1..20: mol_type = genomic DNA
tgacgtcgtgatccacccgc

SEQ ID NO: 160481 - DNA, 20 bp, Homo sapiens
  source 1..20: mol_type = genomic DNA
gacgtcgtgatccacccgcc

SEQ ID NO: 160482 - DNA, 20 bp, Homo sapiens
  source 1..20: mol_type = genomic DNA
acgtcgtgatccacccgcct

SEQ ID NO: 160483 - DNA, 20 bp, Homo sapiens
  source 1..20: mol_type = genomic DNA
cgtcgtgatccacccgcctc

SEQ ID NO: 160484 - DNA, 20 bp, Homo sapiens
  source 1..20: mol_type = genomic DNA
gtcgtgatccacccgcctcg

SEQ ID NO: 160485 - DNA, 20 bp, Homo sapiens
  source 1..20: mol_type = genomic DNA
tcgtgatccacccgcctcgg

SEQ ID NO: 160486 - DNA, 20 bp, Homo sapiens
  source 1..20: mol_type = genomic DNA
cgtgatccacccgcctcggc

SEQ ID NO: 160487 - DNA, 20 bp, Homo sapiens
  source 1..20: mol_type = genomic DNA
gtgatccacccgcctcggcc

SEQ ID NO: 160488 - DNA, 20 bp, Homo sapiens
  source 1..20: mol_type = genomic DNA
tgatccacccgcctcggcct

SEQ ID NO: 160489 - DNA, 20 bp, Homo sapiens
  source 1..20: mol_type = genomic DNA
gatccacccgcctcggcctc

SEQ ID NO: 160490 - DNA, 20 bp, Homo sapiens
  source 1..20: mol_type = genomic DNA
atccacccgcctcggcctcc

SEQ ID NO: 160491 - DNA, 20 bp, Homo sapiens
  source 1..20: mol_type = genomic DNA
tccacccgcctcggcctccc

SEQ ID NO: 160492 - DNA, 20 bp, Homo sapiens
  source 1..20: mol_type = genomic DNA
ccacccgcctcggcctccca

SEQ ID NO: 160493 - DNA, 20 bp, Homo sapiens
  source 1..20: mol_type = genomic DNA
cacccgcctcggcctcccaa

SEQ ID NO: 160494 - DNA, 20 bp, Homo sapiens
  source 1..20: mol_type = genomic DNA
acccgcctcggcctcccaaa

SEQ ID NO: 160495 - DNA, 20 bp, Homo sapiens
  source 1..20: mol_type = genomic DNA
cccgcctcggcctcccaaag

SEQ ID NO: 160496 - DNA, 20 bp, Homo sapiens
  source 1..20: mol_type = genomic DNA
ccgcctcggcctcccaaagt

SEQ ID NO: 160497 - DNA, 20 bp, Homo sapiens
  source 1..20: mol_type = genomic DNA
cgcctcggcctcccaaagtg

SEQ ID NO: 160498 - DNA, 20 bp, Homo sapiens
  source 1..20: mol_type = genomic DNA
gcctcggcctcccaaagtgc

SEQ ID NO: 160499 - DNA, 20 bp, Homo sapiens
  source 1..20: mol_type = genomic DNA
cctcggcctcccaaagtgct

SEQ ID NO: 160500 - DNA, 20 bp, Homo sapiens
  source 1..20: mol_type = genomic DNA
ctcggcctcccaaagtgctg

SEQ ID NO: 160501 - DNA, 20 bp, Homo sapiens
  source 1..20: mol_type = genomic DNA
tcggcctcccaaagtgctgg

SEQ ID NO: 160502 - DNA, 20 bp, Homo sapiens
  source 1..20: mol_type = genomic DNA
cggcctcccaaagtgctggg

SEQ ID NO: 160503 - DNA, 20 bp, Homo sapiens
  source 1..20: mol_type = genomic DNA
ggcctcccaaagtgctggga

SEQ ID NO: 160504 - DNA, 20 bp, Homo sapiens
  source 1..20: mol_type = genomic DNA
gcctcccaaagtgctgggat

SEQ ID NO: 160505 - DNA, 20 bp, Homo sapiens
  source 1..20: mol_type = genomic DNA
cctcccaaagtgctgggatt

SEQ ID NO: 160506 - DNA, 20 bp, Homo sapiens
  source 1..20: mol_type = genomic DNA
ctcccaaagtgctgggatta

SEQ ID NO: 160507 - DNA, 20 bp, Homo sapiens
  source 1..20: mol_type = genomic DNA
tcccaaagtgctgggattac

SEQ ID NO: 160508 - DNA, 20 bp, Homo sapiens
  source 1..20: mol_type = genomic DNA
cccaaagtgctgggattaca

SEQ ID NO: 160509 - DNA, 20 bp, Homo sapiens
  source 1..20: mol_type = genomic DNA
ccaaagtgctgggattacag

SEQ ID NO: 160510 - DNA, 20 bp, Homo sapiens
  source 1..20: mol_type = genomic DNA
caaagtgctgggattacagg

SEQ ID NO: 160511 - DNA, 20 bp, Homo sapiens
  source 1..20: mol_type = genomic DNA
aaagtgctgggattacaggc

SEQ ID NO: 160512 - DNA, 20 bp, Homo sapiens
  source 1..20: mol_type = genomic DNA
aagtgctgggattacaggcg

SEQ ID NO: 160513 - DNA, 20 bp, Homo sapiens
  source 1..20: mol_type = genomic DNA
agtgctgggattacaggcgt

SEQ ID NO: 160514 - DNA, 20 bp, Homo sapiens
  source 1..20: mol_type = genomic DNA
gtgctgggattacaggcgtg

SEQ ID NO: 160515 - DNA, 20 bp, Homo sapiens
  source 1..20: mol_type = genomic DNA
tgctgggattacaggcgtga

SEQ ID NO: 160516 - DNA, 20 bp, Homo sapiens
  source 1..20: mol_type = genomic DNA
gctgggattacaggcgtgag

SEQ ID NO: 160517 - DNA, 20 bp, Homo sapiens
  source 1..20: mol_type = genomic DNA
ctgggattacaggcgtgagc

SEQ ID NO: 160518 - DNA, 20 bp, Homo sapiens
  source 1..20: mol_type = genomic DNA
tgggattacaggcgtgagcc

SEQ ID NO: 160519 - DNA, 20 bp, Homo sapiens
  source 1..20: mol_type = genomic DNA
gggattacaggcgtgagcca

SEQ ID NO: 160520 - DNA, 20 bp, Homo sapiens
  source 1..20: mol_type = genomic DNA
ggattacaggcgtgagccac

SEQ ID NO: 160521 - DNA, 20 bp, Homo sapiens
  source 1..20: mol_type = genomic DNA
gattacaggcgtgagccacc

SEQ ID NO: 160522 - DNA, 20 bp, Homo sapiens
  source 1..20: mol_type = genomic DNA
attacaggcgtgagccaccc

SEQ ID NO: 160523 - DNA, 20 bp, Homo sapiens
  source 1..20: mol_type = genomic DNA
ttacaggcgtgagccacccc

SEQ ID NO: 160524 - DNA, 20 bp, Homo sapiens
  source 1..20: mol_type = genomic DNA
tacaggcgtgagccaccccg

SEQ ID NO: 160525 - DNA, 20 bp, Homo sapiens
  source 1..20: mol_type = genomic DNA
acaggcgtgagccaccccgc

SEQ ID NO: 160526 - DNA, 20 bp, Homo sapiens
  source 1..20: mol_type = genomic DNA
caggcgtgagccaccccgcc

SEQ ID NO: 160527 - DNA, 20 bp, Homo sapiens
  source 1..20: mol_type = genomic DNA
aggcgtgagccaccccgccc

SEQ ID NO: 160528 - DNA, 20 bp, Homo sapiens
  source 1..20: mol_type = genomic DNA
ggcgtgagccaccccgcccg

SEQ ID NO: 160529 - DNA, 20 bp, Homo sapiens
  source 1..20: mol_type = genomic DNA
gcgtgagccaccccgcccgg

SEQ ID NO: 160530 - DNA, 20 bp, Homo sapiens
  source 1..20: mol_type = genomic DNA
cgtgagccaccccgcccggc

SEQ ID NO: 160531 - DNA, 20 bp, Homo sapiens
  source 1..20: mol_type = genomic DNA
gtgagccaccccgcccggcc

SEQ ID NO: 160532 - DNA, 20 bp, Homo sapiens
  source 1..20: mol_type = genomic DNA
tgagccaccccgcccggcca

SEQ ID NO: 160533 - DNA, 20 bp, Homo sapiens
  source 1..20: mol_type = genomic DNA
gagccaccccgcccggccac

SEQ ID NO: 160534 - DNA, 20 bp, Homo sapiens
  source 1..20: mol_type = genomic DNA
agccaccccgcccggccacc

SEQ ID NO: 160535 - DNA, 20 bp, Homo sapiens
  source 1..20: mol_type = genomic DNA
gccaccccgcccggccacca

SEQ ID NO: 160536 - DNA, 20 bp, Homo sapiens
  source 1..20: mol_type = genomic DNA
ccaccccgcccggccaccag

SEQ ID NO: 160537 - DNA, 20 bp, Homo sapiens
  source 1..20: mol_type = genomic DNA
caccccgcccggccaccagt

SEQ ID NO: 160538 - DNA, 20 bp, Homo sapiens
  source 1..20: mol_type = genomic DNA
accccgcccggccaccagtg

SEQ ID NO: 160539 - DNA, 20 bp, Homo sapiens
  source 1..20: mol_type = genomic DNA
ccccgcccggccaccagtgc

SEQ ID NO: 160540 - DNA, 20 bp, Homo sapiens
  source 1..20: mol_type = genomic DNA
cccgcccggccaccagtgct

SEQ ID NO: 160541 - DNA, 20 bp, Homo sapiens
  source 1..20: mol_type = genomic DNA
ccgcccggccaccagtgcta

SEQ ID NO: 160542 - DNA, 20 bp, Homo sapiens
  source 1..20: mol_type = genomic DNA
cgcccggccaccagtgctat

SEQ ID NO: 160543 - DNA, 20 bp, Homo sapiens
  source 1..20: mol_type = genomic DNA
gcccggccaccagtgctatt

SEQ ID NO: 160544 - DNA, 20 bp, Homo sapiens
  source 1..20: mol_type = genomic DNA
cccggccaccagtgctattc

SEQ ID NO: 160545 - DNA, 20 bp, Homo sapiens
  source 1..20: mol_type = genomic DNA
ccggccaccagtgctattct

SEQ ID NO: 160546 - DNA, 20 bp, Homo sapiens
  source 1..20: mol_type = genomic DNA
cggccaccagtgctattctt

SEQ ID NO: 160547 - DNA, 20 bp, Homo sapiens
  source 1..20: mol_type = genomic DNA
ggccaccagtgctattctta

SEQ ID NO: 160548 - DNA, 20 bp, Homo sapiens
  source 1..20: mol_type = genomic DNA
gccaccagtgctattcttaa

SEQ ID NO: 160549 - DNA, 20 bp, Homo sapiens
  source 1..20: mol_type = genomic DNA
ccaccagtgctattcttaag

SEQ ID NO: 160550 - DNA, 20 bp, Homo sapiens
  source 1..20: mol_type = genomic DNA
caccagtgctattcttaaga

SEQ ID NO: 160551 - DNA, 20 bp, Homo sapiens
  source 1..20: mol_type = genomic DNA
accagtgctattcttaagac

SEQ ID NO: 160552 - DNA, 20 bp, Homo sapiens
  source 1..20: mol_type = genomic DNA
ccagtgctattcttaagacg

SEQ ID NO: 160553 - DNA, 20 bp, Homo sapiens
  source 1..20: mol_type = genomic DNA
cagtgctattcttaagacgc

SEQ ID NO: 160554 - DNA, 20 bp, Homo sapiens
  source 1..20: mol_type = genomic DNA
agtgctattcttaagacgcc

SEQ ID NO: 160555 - DNA, 20 bp, Homo sapiens
  source 1..20: mol_type = genomic DNA
gtgctattcttaagacgcct

SEQ ID NO: 160556 - DNA, 20 bp, Homo sapiens
  source 1..20: mol_type = genomic DNA
tgctattcttaagacgcctc

SEQ ID NO: 160557 - DNA, 20 bp, Homo sapiens
  source 1..20: mol_type = genomic DNA
gctattcttaagacgcctct

SEQ ID NO: 160558 - DNA, 20 bp, Homo sapiens
  source 1..20: mol_type = genomic DNA
ctattcttaagacgcctctg

SEQ ID NO: 160559 - DNA, 20 bp, Homo sapiens
  source 1..20: mol_type = genomic DNA
tattcttaagacgcctctga

SEQ ID NO: 160560 - DNA, 20 bp, Homo sapiens
  source 1..20: mol_type = genomic DNA
attcttaagacgcctctgag

SEQ ID NO: 160561 - DNA, 20 bp, Homo sapiens
  source 1..20: mol_type = genomic DNA
ttcttaagacgcctctgagg

SEQ ID NO: 160562 - DNA, 20 bp, Homo sapiens
  source 1..20: mol_type = genomic DNA
tcttaagacgcctctgagga

SEQ ID NO: 160563 - DNA, 20 bp, Homo sapiens
  source 1..20: mol_type = genomic DNA
cttaagacgcctctgaggaa

SEQ ID NO: 160564 - DNA, 20 bp, Homo sapiens
  source 1..20: mol_type = genomic DNA
ttaagacgcctctgaggaat

SEQ ID NO: 160565 - DNA, 20 bp, Homo sapiens
  source 1..20: mol_type = genomic DNA
taagacgcctctgaggaatc

SEQ ID NO: 160566 - DNA, 20 bp, Homo sapiens
  source 1..20: mol_type = genomic DNA
aagacgcctctgaggaatcc

SEQ ID NO: 160567 - DNA, 20 bp, Homo sapiens
  source 1..20: mol_type = genomic DNA
agacgcctctgaggaatccc

SEQ ID NO: 160568 - DNA, 20 bp, Homo sapiens
  source 1..20: mol_type = genomic DNA
gacgcctctgaggaatccct

SEQ ID NO: 160569 - DNA, 20 bp, Homo sapiens
  source 1..20: mol_type = genomic DNA
acgcctctgaggaatccctt

SEQ ID NO: 160570 - DNA, 20 bp, Homo sapiens
  source 1..20: mol_type = genomic DNA
cgcctctgaggaatcccttc

SEQ ID NO: 160571 - DNA, 20 bp, Homo sapiens
  source 1..20: mol_type = genomic DNA
gcctctgaggaatcccttct

SEQ ID NO: 160572 - DNA, 20 bp, Homo sapiens
  source 1..20: mol_type = genomic DNA
cctctgaggaatcccttctc

SEQ ID NO: 160573 - DNA, 20 bp, Homo sapiens
  source 1..20: mol_type = genomic DNA
ctctgaggaatcccttctcc

SEQ ID NO: 160574 - DNA, 20 bp, Homo sapiens
  source 1..20: mol_type = genomic DNA
tctgaggaatcccttctccc

SEQ ID NO: 160575 - DNA, 20 bp, Homo sapiens
  source 1..20: mol_type = genomic DNA
ctgaggaatcccttctccct

SEQ ID NO: 160576 - DNA, 20 bp, Homo sapiens
  source 1..20: mol_type = genomic DNA
tgaggaatcccttctccctg

SEQ ID NO: 160577 - DNA, 20 bp, Homo sapiens
  source 1..20: mol_type = genomic DNA
gaggaatcccttctccctgg

SEQ ID NO: 160578 - DNA, 20 bp, Homo sapiens
  source 1..20: mol_type = genomic DNA
aggaatcccttctccctggc

SEQ ID NO: 160579 - DNA, 20 bp, Homo sapiens
  source 1..20: mol_type = genomic DNA
ggaatcccttctccctggcc

SEQ ID NO: 160580 - DNA, 20 bp, Homo sapiens
  source 1..20: mol_type = genomic DNA
gaatcccttctccctggcca

SEQ ID NO: 160581 - DNA, 20 bp, Homo sapiens
  source 1..20: mol_type = genomic DNA
aatcccttctccctggccat

SEQ ID NO: 160582 - DNA, 20 bp, Homo sapiens
  source 1..20: mol_type = genomic DNA
atcccttctccctggccatt

SEQ ID NO: 160583 - DNA, 20 bp, Homo sapiens
  source 1..20: mol_type = genomic DNA
tcccttctccctggccattg

SEQ ID NO: 160584 - DNA, 20 bp, Homo sapiens
  source 1..20: mol_type = genomic DNA
cccttctccctggccattga

SEQ ID NO: 160585 - DNA, 20 bp, Homo sapiens
  source 1..20: mol_type = genomic DNA
ccttctccctggccattgag

SEQ ID NO: 160586 - DNA, 20 bp, Homo sapiens
  source 1..20: mol_type = genomic DNA
cttctccctggccattgaga

SEQ ID NO: 160587 - DNA, 20 bp, Homo sapiens
  source 1..20: mol_type = genomic DNA
ttctccctggccattgagaa

SEQ ID NO: 160588 - DNA, 20 bp, Homo sapiens
  source 1..20: mol_type = genomic DNA
tctccctggccattgagaat

SEQ ID NO: 160589 - DNA, 20 bp, Homo sapiens
  source 1..20: mol_type = genomic DNA
ctccctggccattgagaatc

SEQ ID NO: 160590 - DNA, 20 bp, Homo sapiens
  source 1..20: mol_type = genomic DNA
tccctggccattgagaatcc

SEQ ID NO: 160591 - DNA, 20 bp, Homo sapiens
  source 1..20: mol_type = genomic DNA
ccctggccattgagaatcca

SEQ ID NO: 160592 - DNA, 20 bp, Homo sapiens
  source 1..20: mol_type = genomic DNA
cctggccattgagaatccat

SEQ ID NO: 160593 - DNA, 20 bp, Homo sapiens
  source 1..20: mol_type = genomic DNA
ctggccattgagaatccatg

SEQ ID NO: 160594 - DNA, 20 bp, Homo sapiens
  source 1..20: mol_type = genomic DNA
tggccattgagaatccatgc

SEQ ID NO: 160595 - DNA, 20 bp, Homo sapiens
  source 1..20: mol_type = genomic DNA
ggccattgagaatccatgca

SEQ ID NO: 160596 - DNA, 20 bp, Homo sapiens
  source 1..20: mol_type = genomic DNA
gccattgagaatccatgcat

SEQ ID NO: 160597 - DNA, 20 bp, Homo sapiens
  source 1..20: mol_type = genomic DNA
ccattgagaatccatgcatg

SEQ ID NO: 160598 - DNA, 20 bp, Homo sapiens
  source 1..20: mol_type = genomic DNA
cattgagaatccatgcatga

SEQ ID NO: 160599 - DNA, 20 bp, Homo sapiens
  source 1..20: mol_type = genomic DNA
attgagaatccatgcatgaa

SEQ ID NO: 160600 - DNA, 20 bp, Homo sapiens
  source 1..20: mol_type = genomic DNA
ttgagaatccatgcatgaac

SEQ ID NO: 160601 - DNA, 20 bp, Homo sapiens
  source 1..20: mol_type = genomic DNA
tgagaatccatgcatgaacc

SEQ ID NO: 160602 - DNA, 20 bp, Homo sapiens
  source 1..20: mol_type = genomic DNA
gagaatccatgcatgaaccc

SEQ ID NO: 160603 - DNA, 20 bp, Homo sapiens
  source 1..20: mol_type = genomic DNA
agaatccatgcatgaaccca

SEQ ID NO: 160604 - DNA, 20 bp, Homo sapiens
  source 1..20: mol_type = genomic DNA
gaatccatgcatgaacccag

SEQ ID NO: 160605 - DNA, 20 bp, Homo sapiens
  source 1..20: mol_type = genomic DNA
aatccatgcatgaacccagg

SEQ ID NO: 160606 - DNA, 20 bp, Homo sapiens
  source 1..20: mol_type = genomic DNA
atccatgcatgaacccaggt

SEQ ID NO: 160607 - DNA, 20 bp, Homo sapiens
  source 1..20: mol_type = genomic DNA
tccatgcatgaacccaggtt

SEQ ID NO: 160608 - DNA, 20 bp, Homo sapiens
  source 1..20: mol_type = genomic DNA
ccatgcatgaacccaggttt

SEQ ID NO: 160609 - DNA, 20 bp, Homo sapiens
  source 1..20: mol_type = genomic DNA
catgcatgaacccaggtttt

SEQ ID NO: 160610 - DNA, 20 bp, Homo sapiens
  source 1..20: mol_type = genomic DNA
atgcatgaacccaggttttc

SEQ ID NO: 160611 - DNA, 20 bp, Homo sapiens
  source 1..20: mol_type = genomic DNA
tgcatgaacccaggttttcc

SEQ ID NO: 160612 - DNA, 20 bp, Homo sapiens
  source 1..20: mol_type = genomic DNA
gcatgaacccaggttttcca

SEQ ID NO: 160613 - DNA, 20 bp, Homo sapiens
  source 1..20: mol_type = genomic DNA
catgaacccaggttttccac

SEQ ID NO: 160614 - DNA, 20 bp, Homo sapiens
  source 1..20: mol_type = genomic DNA
atgaacccaggttttccacc

SEQ ID NO: 160615 - DNA, 20 bp, Homo sapiens
  source 1..20: mol_type = genomic DNA
tgaacccaggttttccacct

SEQ ID NO: 160616 - DNA, 20 bp, Homo sapiens
  source 1..20: mol_type = genomic DNA
gaacccaggttttccacctt

SEQ ID NO: 160617 - DNA, 20 bp, Homo sapiens
  source 1..20: mol_type = genomic DNA
aacccaggttttccaccttc

SEQ ID NO: 160618 - DNA, 20 bp, Homo sapiens
  source 1..20: mol_type = genomic DNA
acccaggttttccaccttcc

SEQ ID NO: 160619 - DNA, 20 bp, Homo sapiens
  source 1..20: mol_type = genomic DNA
cccaggttttccaccttccc

SEQ ID NO: 160620 - DNA, 20 bp, Homo sapiens
  source 1..20: mol_type = genomic DNA
ccaggttttccaccttccct

SEQ ID NO: 160621 - DNA, 20 bp, Homo sapiens
  source 1..20: mol_type = genomic DNA
caggttttccaccttccctg

SEQ ID NO: 160622 - DNA, 20 bp, Homo sapiens
  source 1..20: mol_type = genomic DNA
aggttttccaccttccctga

SEQ ID NO: 160623 - DNA, 20 bp, Homo sapiens
  source 1..20: mol_type = genomic DNA
ggttttccaccttccctgag

SEQ ID NO: 160624 - DNA, 20 bp, Homo sapiens
  source 1..20: mol_type = genomic DNA
gttttccaccttccctgagc

SEQ ID NO: 160625 - DNA, 20 bp, Homo sapiens
  source 1..20: mol_type = genomic DNA
ttttccaccttccctgagca

SEQ ID NO: 160626 - DNA, 20 bp, Homo sapiens
  source 1..20: mol_type = genomic DNA
tttccaccttccctgagcag

SEQ ID NO: 160627 - DNA, 20 bp, Homo sapiens
  source 1..20: mol_type = genomic DNA
ttccaccttccctgagcagc

SEQ ID NO: 160628 - DNA, 20 bp, Homo sapiens
  source 1..20: mol_type = genomic DNA
tccaccttccctgagcagct

SEQ ID NO: 160629 - DNA, 20 bp, Homo sapiens
  source 1..20: mol_type = genomic DNA
ccaccttccctgagcagctt

SEQ ID NO: 160630 - DNA, 20 bp, Homo sapiens
  source 1..20: mol_type = genomic DNA
caccttccctgagcagcttg

SEQ ID NO: 160631 - DNA, 20 bp, Homo sapiens
  source 1..20: mol_type = genomic DNA
accttccctgagcagcttgc

SEQ ID NO: 160632 - DNA, 20 bp, Homo sapiens
  source 1..20: mol_type = genomic DNA
ccttccctgagcagcttgca

SEQ ID NO: 160633 - DNA, 20 bp, Homo sapiens
  source 1..20: mol_type = genomic DNA
cttccctgagcagcttgcat

SEQ ID NO: 160634 - DNA, 20 bp, Homo sapiens
  source 1..20: mol_type = genomic DNA
ttccctgagcagcttgcata

SEQ ID NO: 160635 - DNA, 20 bp, Homo sapiens
  source 1..20: mol_type = genomic DNA
tccctgagcagcttgcatag

SEQ ID NO: 160636 - DNA, 20 bp, Homo sapiens
  source 1..20: mol_type = genomic DNA
ccctgagcagcttgcatagt

SEQ ID NO: 160637 - DNA, 20 bp, Homo sapiens
  source 1..20: mol_type = genomic DNA
cctgagcagcttgcatagtt

SEQ ID NO: 160638 - DNA, 20 bp, Homo sapiens
  source 1..20: mol_type = genomic DNA
ctgagcagcttgcatagttc

SEQ ID NO: 160639 - DNA, 20 bp, Homo sapiens
  source 1..20: mol_type = genomic DNA
tgagcagcttgcatagttcc

SEQ ID NO: 160640 - DNA, 20 bp, Homo sapiens
  source 1..20: mol_type = genomic DNA
gagcagcttgcatagttcct

SEQ ID NO: 160641 - DNA, 20 bp, Homo sapiens
  source 1..20: mol_type = genomic DNA
agcagcttgcatagttcctt

SEQ ID NO: 160642 - DNA, 20 bp, Homo sapiens
  source 1..20: mol_type = genomic DNA
gcagcttgcatagttccttc

SEQ ID NO: 160643 - DNA, 20 bp, Homo sapiens
  source 1..20: mol_type = genomic DNA
cagcttgcatagttccttct

SEQ ID NO: 160644 - DNA, 20 bp, Homo sapiens
  source 1..20: mol_type = genomic DNA
agcttgcatagttccttctt

SEQ ID NO: 160645 - DNA, 20 bp, Homo sapiens
  source 1..20: mol_type = genomic DNA
gcttgcatagttccttcttt

SEQ ID NO: 160646 - DNA, 20 bp, Homo sapiens
  source 1..20: mol_type = genomic DNA
cttgcatagttccttctttt

SEQ ID NO: 160647 - DNA, 20 bp, Homo sapiens
  source 1..20: mol_type = genomic DNA
ttgcatagttccttctttta

SEQ ID NO: 160648 - DNA, 20 bp, Homo sapiens
  source 1..20: mol_type = genomic DNA
tgcatagttccttcttttaa

SEQ ID NO: 160649 - DNA, 20 bp, Homo sapiens
  source 1..20: mol_type = genomic DNA
gcatagttccttcttttaag

SEQ ID NO: 160650 - DNA, 20 bp, Homo sapiens
  source 1..20: mol_type = genomic DNA
catagttccttcttttaagc

SEQ ID NO: 160651 - DNA, 20 bp, Homo sapiens
  source 1..20: mol_type = genomic DNA
atagttccttcttttaagcg

SEQ ID NO: 160652 - DNA, 20 bp, Homo sapiens
  source 1..20: mol_type = genomic DNA
tagttccttcttttaagcgc

SEQ ID NO: 160653 - DNA, 20 bp, Homo sapiens
  source 1..20: mol_type = genomic DNA
agttccttcttttaagcgcc

SEQ ID NO: 160654 - DNA, 20 bp, Homo sapiens
  source 1..20: mol_type = genomic DNA
gttccttcttttaagcgcct

SEQ ID NO: 160655 - DNA, 20 bp, Homo sapiens
  source 1..20: mol_type = genomic DNA
ttccttcttttaagcgcctg

SEQ ID NO: 160656 - DNA, 20 bp, Homo sapiens
  source 1..20: mol_type = genomic DNA
tccttcttttaagcgcctga

SEQ ID NO: 160657 - DNA, 20 bp, Homo sapiens
  source 1..20: mol_type = genomic DNA
ccttcttttaagcgcctgac

SEQ ID NO: 160658 - DNA, 20 bp, Homo sapiens
  source 1..20: mol_type = genomic DNA
cttcttttaagcgcctgact

SEQ ID NO: 160659 - DNA, 20 bp, Homo sapiens
  source 1..20: mol_type = genomic DNA
ttcttttaagcgcctgactt

SEQ ID NO: 160660 - DNA, 20 bp, Homo sapiens
  source 1..20: mol_type = genomic DNA
tcttttaagcgcctgacttc

SEQ ID NO: 160661 - DNA, 20 bp, Homo sapiens
  source 1..20: mol_type = genomic DNA
cttttaagcgcctgacttcg

SEQ ID NO: 160662 - DNA, 20 bp, Homo sapiens
  source 1..20: mol_type = genomic DNA
ttttaagcgcctgacttcgt

SEQ ID NO: 160663 - DNA, 20 bp, Homo sapiens
  source 1..20: mol_type = genomic DNA
tttaagcgcctgacttcgtt

SEQ ID NO: 160664 - DNA, 20 bp, Homo sapiens
  source 1..20: mol_type = genomic DNA
ttaagcgcctgacttcgttt

SEQ ID NO: 160665 - DNA, 20 bp, Homo sapiens
  source 1..20: mol_type = genomic DNA
taagcgcctgacttcgtttt

SEQ ID NO: 160666 - DNA, 20 bp, Homo sapiens
  source 1..20: mol_type = genomic DNA
aagcgcctgacttcgttttg

SEQ ID NO: 160667 - DNA, 20 bp, Homo sapiens
  source 1..20: mol_type = genomic DNA
agcgcctgacttcgttttgt

SEQ ID NO: 160668 - DNA, 20 bp, Homo sapiens
  source 1..20: mol_type = genomic DNA
gcgcctgacttcgttttgtt

SEQ ID NO: 160669 - DNA, 20 bp, Homo sapiens
  source 1..20: mol_type = genomic DNA
cgcctgacttcgttttgttt

SEQ ID NO: 160670 - DNA, 20 bp, Homo sapiens
  source 1..20: mol_type = genomic DNA
gcctgacttcgttttgtttg

SEQ ID NO: 160671 - DNA, 20 bp, Homo sapiens
  source 1..20: mol_type = genomic DNA
cctgacttcgttttgtttgg

SEQ ID NO: 160672 - DNA, 20 bp, Homo sapiens
  source 1..20: mol_type = genomic DNA
ctgacttcgttttgtttggt

SEQ ID NO: 160673 - DNA, 20 bp, Homo sapiens
  source 1..20: mol_type = genomic DNA
tgacttcgttttgtttggtg

SEQ ID NO: 160674 - DNA, 20 bp, Homo sapiens
  source 1..20: mol_type = genomic DNA
gacttcgttttgtttggtgc

SEQ ID NO: 160675 - DNA, 20 bp, Homo sapiens
  source 1..20: mol_type = genomic DNA
acttcgttttgtttggtgcc

SEQ ID NO: 160676 - DNA, 20 bp, Homo sapiens
  source 1..20: mol_type = genomic DNA
cttcgttttgtttggtgccc

SEQ ID NO: 160677 - DNA, 20 bp, Homo sapiens
  source 1..20: mol_type = genomic DNA
ttcgttttgtttggtgcccg

SEQ ID NO: 160678 - DNA, 20 bp, Homo sapiens
  source 1..20: mol_type = genomic DNA
tcgttttgtttggtgcccgt

SEQ ID NO: 160679 - DNA, 20 bp, Homo sapiens
  source 1..20: mol_type = genomic DNA
cgttttgtttggtgcccgtt

SEQ ID NO: 160680 - DNA, 20 bp, Homo sapiens
  source 1..20: mol_type = genomic DNA
gttttgtttggtgcccgttg

SEQ ID NO: 160681 - DNA, 20 bp, Homo sapiens
  source 1..20: mol_type = genomic DNA
ttttgtttggtgcccgttgt

SEQ ID NO: 160682 - DNA, 20 bp, Homo sapiens
  source 1..20: mol_type = genomic DNA
tttgtttggtgcccgttgta

SEQ ID NO: 160683 - DNA, 20 bp, Homo sapiens
  source 1..20: mol_type = genomic DNA
ttgtttggtgcccgttgtac

SEQ ID NO: 160684 - DNA, 20 bp, Homo sapiens
  source 1..20: mol_type = genomic DNA
tgtttggtgcccgttgtacc

SEQ ID NO: 160685 - DNA, 20 bp, Homo sapiens
  source 1..20: mol_type = genomic DNA
gtttggtgcccgttgtacct

SEQ ID NO: 160686 - DNA, 20 bp, Homo sapiens
  source 1..20: mol_type = genomic DNA
tttggtgcccgttgtacctg

SEQ ID NO: 160687 - DNA, 20 bp, Homo sapiens
  source 1..20: mol_type = genomic DNA
ttggtgcccgttgtacctga

SEQ ID NO: 160688 - DNA, 20 bp, Homo sapiens
  source 1..20: mol_type = genomic DNA
tggtgcccgttgtacctgag

SEQ ID NO: 160689 - DNA, 20 bp, Homo sapiens
  source 1..20: mol_type = genomic DNA
ggtgcccgttgtacctgaga

SEQ ID NO: 160690 - DNA, 20 bp, Homo sapiens
  source 1..20: mol_type = genomic DNA
gtgcccgttgtacctgagaa

SEQ ID NO: 160691 - DNA, 20 bp, Homo sapiens
  source 1..20: mol_type = genomic DNA
tgcccgttgtacctgagaat

SEQ ID NO: 160692 - DNA, 20 bp, Homo sapiens
  source 1..20: mol_type = genomic DNA
gcccgttgtacctgagaatg

SEQ ID NO: 160693 - DNA, 20 bp, Homo sapiens
  source 1..20: mol_type = genomic DNA
cccgttgtacctgagaatga

SEQ ID NO: 160694 - DNA, 20 bp, Homo sapiens
  source 1..20: mol_type = genomic DNA
ccgttgtacctgagaatgag

SEQ ID NO: 160695 - DNA, 20 bp, Homo sapiens
  source 1..20: mol_type = genomic DNA
cgttgtacctgagaatgagc

SEQ ID NO: 160696 - DNA, 20 bp, Homo sapiens
  source 1..20: mol_type = genomic DNA
gttgtacctgagaatgagcc

SEQ ID NO: 160697 - DNA, 20 bp, Homo sapiens
  source 1..20: mol_type = genomic DNA
ttgtacctgagaatgagcct

SEQ ID NO: 160698 - DNA, 20 bp, Homo sapiens
  source 1..20: mol_type = genomic DNA
tgtacctgagaatgagcctt

SEQ ID NO: 160699 - DNA, 20 bp, Homo sapiens
  source 1..20: mol_type = genomic DNA
gtacctgagaatgagccttg

SEQ ID NO: 160700 - DNA, 20 bp, Homo sapiens
  source 1..20: mol_type = genomic DNA
tacctgagaatgagccttgg

SEQ ID NO: 160701 - DNA, 20 bp, Homo sapiens
  source 1..20: mol_type = genomic DNA
acctgagaatgagccttgga

SEQ ID NO: 160702 - DNA, 20 bp, Homo sapiens
  source 1..20: mol_type = genomic DNA
cctgagaatgagccttggat

SEQ ID NO: 160703 - DNA, 20 bp, Homo sapiens
  source 1..20: mol_type = genomic DNA
ctgagaatgagccttggata

SEQ ID NO: 160704 - DNA, 20 bp, Homo sapiens
  source 1..20: mol_type = genomic DNA
tgagaatgagccttggatag

SEQ ID NO: 160705 - DNA, 20 bp, Homo sapiens
  source 1..20: mol_type = genomic DNA
gagaatgagccttggatagt

SEQ ID NO: 160706 - DNA, 20 bp, Homo sapiens
  source 1..20: mol_type = genomic DNA
agaatgagccttggatagtg

SEQ ID NO: 160707 - DNA, 20 bp, Homo sapiens
  source 1..20: mol_type = genomic DNA
gaatgagccttggatagtgg

SEQ ID NO: 160708 - DNA, 20 bp, Homo sapiens
  source 1..20: mol_type = genomic DNA
aatgagccttggatagtgga

SEQ ID NO: 160709 - DNA, 20 bp, Homo sapiens
  source 1..20: mol_type = genomic DNA
atgagccttggatagtggag

SEQ ID NO: 160710 - DNA, 20 bp, Homo sapiens
  source 1..20: mol_type = genomic DNA
tgagccttggatagtggagc

SEQ ID NO: 160711 - DNA, 20 bp, Homo sapiens
  source 1..20: mol_type = genomic DNA
gagccttggatagtggagca

SEQ ID NO: 160712 - DNA, 20 bp, Homo sapiens
  source 1..20: mol_type = genomic DNA
agccttggatagtggagcat

SEQ ID NO: 160713 - DNA, 20 bp, Homo sapiens
  source 1..20: mol_type = genomic DNA
gccttggatagtggagcatt

SEQ ID NO: 160714 - DNA, 20 bp, Homo sapiens
  source 1..20: mol_type = genomic DNA
ccttggatagtggagcattc

SEQ ID NO: 160715 - DNA, 20 bp, Homo sapiens
  source 1..20: mol_type = genomic DNA
cttggatagtggagcattcc

SEQ ID NO: 160716 - DNA, 20 bp, Homo sapiens
  source 1..20: mol_type = genomic DNA
ttggatagtggagcattcca

SEQ ID NO: 160717 - DNA, 20 bp, Homo sapiens
  source 1..20: mol_type = genomic DNA
tggatagtggagcattccag

SEQ ID NO: 160718 - DNA, 20 bp, Homo sapiens
  source 1..20: mol_type = genomic DNA
ggatagtggagcattccagc

SEQ ID NO: 160719 - DNA, 20 bp, Homo sapiens
  source 1..20: mol_type = genomic DNA
gatagtggagcattccagct

SEQ ID NO: 160720 - DNA, 20 bp, Homo sapiens
  source 1..20: mol_type = genomic DNA
atagtggagcattccagctt

SEQ ID NO: 160721 - DNA, 20 bp, Homo sapiens
  source 1..20: mol_type = genomic DNA
tagtggagcattccagcttt

SEQ ID NO: 160722 - DNA, 20 bp, Homo sapiens
  source 1..20: mol_type = genomic DNA
agtggagcattccagctttc

SEQ ID NO: 160723 - DNA, 20 bp, Homo sapiens
  source 1..20: mol_type = genomic DNA
gtggagcattccagctttcc

SEQ ID NO: 160724 - DNA, 20 bp, Homo sapiens
  source 1..20: mol_type = genomic DNA
tggagcattccagctttcca

SEQ ID NO: 160725 - DNA, 20 bp, Homo sapiens
  source 1..20: mol_type = genomic DNA
ggagcattccagctttccag

SEQ ID NO: 160726 - DNA, 20 bp, Homo sapiens
  source 1..20: mol_type = genomic DNA
gagcattccagctttccaga

SEQ ID NO: 160727 - DNA, 20 bp, Homo sapiens
  source 1..20: mol_type = genomic DNA
agcattccagctttccagat

SEQ ID NO: 160728 - DNA, 20 bp, Homo sapiens
  source 1..20: mol_type = genomic DNA
gcattccagctttccagata

SEQ ID NO: 160729 - DNA, 20 bp, Homo sapiens
  source 1..20: mol_type = genomic DNA
cattccagctttccagatat

SEQ ID NO: 160730 - DNA, 20 bp, Homo sapiens
  source 1..20: mol_type = genomic DNA
attccagctttccagatatg

SEQ ID NO: 160731 - DNA, 20 bp, Homo sapiens
  source 1..20: mol_type = genomic DNA
ttccagctttccagatatgc

SEQ ID NO: 160732 - DNA, 20 bp, Homo sapiens
  source 1..20: mol_type = genomic DNA
tccagctttccagatatgca

SEQ ID NO: 160733 - DNA, 20 bp, Homo sapiens
  source 1..20: mol_type = genomic DNA
ccagctttccagatatgcag

SEQ ID NO: 160734 - DNA, 20 bp, Homo sapiens
  source 1..20: mol_type = genomic DNA
cagctttccagatatgcaga

SEQ ID NO: 160735 - DNA, 20 bp, Homo sapiens
  source 1..20: mol_type = genomic DNA
agctttccagatatgcagag

SEQ ID NO: 160736 - DNA, 20 bp, Homo sapiens
  source 1..20: mol_type = genomic DNA
gctttccagatatgcagaga

SEQ ID NO: 160737 - DNA, 20 bp, Homo sapiens
  source 1..20: mol_type = genomic DNA
ctttccagatatgcagagat

SEQ ID NO: 160738 - DNA, 20 bp, Homo sapiens
  source 1..20: mol_type = genomic DNA
tttccagatatgcagagata

SEQ ID NO: 160739 - DNA, 20 bp, Homo sapiens
  source 1..20: mol_type = genomic DNA
ttccagatatgcagagataa

SEQ ID NO: 160740 - DNA, 20 bp, Homo sapiens
  source 1..20: mol_type = genomic DNA
tccagatatgcagagataat

SEQ ID NO: 160741 - DNA, 20 bp, Homo sapiens
  source 1..20: mol_type = genomic DNA
ccagatatgcagagataata

SEQ ID NO: 160742 - DNA, 20 bp, Homo sapiens
  source 1..20: mol_type = genomic DNA
cagatatgcagagataatac

SEQ ID NO: 160743 - DNA, 20 bp, Homo sapiens
  source 1..20: mol_type = genomic DNA
agatatgcagagataataca

SEQ ID NO: 160744 - DNA, 20 bp, Homo sapiens
  source 1..20: mol_type = genomic DNA
gatatgcagagataatacat

SEQ ID NO: 160745 - DNA, 20 bp, Homo sapiens
  source 1..20: mol_type = genomic DNA
atatgcagagataatacatt

SEQ ID NO: 160746 - DNA, 20 bp, Homo sapiens
  source 1..20: mol_type = genomic DNA
tatgcagagataatacattg

SEQ ID NO: 160747 - DNA, 20 bp, Homo sapiens
  source 1..20: mol_type = genomic DNA
atgcagagataatacattgg

SEQ ID NO: 160748 - DNA, 20 bp, Homo sapiens
  source 1..20: mol_type = genomic DNA
tgcagagataatacattggc

SEQ ID NO: 160749 - DNA, 20 bp, Homo sapiens
  source 1..20: mol_type = genomic DNA
gcagagataatacattggct

SEQ ID NO: 160750 - DNA, 20 bp, Homo sapiens
  source 1..20: mol_type = genomic DNA
cagagataatacattggcta

SEQ ID NO: 160751 - DNA, 20 bp, Homo sapiens
  source 1..20: mol_type = genomic DNA
agagataatacattggctat

SEQ ID NO: 160752 - DNA, 20 bp, Homo sapiens
  source 1..20: mol_type = genomic DNA
gagataatacattggctatc

SEQ ID NO: 160753 - DNA, 20 bp, Homo sapiens
  source 1..20: mol_type = genomic DNA
agataatacattggctatca

SEQ ID NO: 160754 - DNA, 20 bp, Homo sapiens
  source 1..20: mol_type = genomic DNA
gataatacattggctatcag

SEQ ID NO: 160755 - DNA, 20 bp, Homo sapiens
  source 1..20: mol_type = genomic DNA
ataatacattggctatcagc

SEQ ID NO: 160756 - DNA, 20 bp, Homo sapiens
  source 1..20: mol_type = genomic DNA
taatacattggctatcagct

SEQ ID NO: 160757 - DNA, 20 bp, Homo sapiens
  source 1..20: mol_type = genomic DNA
aatacattggctatcagcta

SEQ ID NO: 160758 - DNA, 20 bp, Homo sapiens
  source 1..20: mol_type = genomic DNA
atacattggctatcagctac

SEQ ID NO: 160759 - DNA, 20 bp, Homo sapiens
  source 1..20: mol_type = genomic DNA
tacattggctatcagctact

SEQ ID NO: 160760 - DNA, 20 bp, Homo sapiens
  source 1..20: mol_type = genomic DNA
acattggctatcagctactt

SEQ ID NO: 160761 - DNA, 20 bp, Homo sapiens
  source 1..20: mol_type = genomic DNA
cattggctatcagctacttg

SEQ ID NO: 160762 - DNA, 20 bp, Homo sapiens
  source 1..20: mol_type = genomic DNA
attggctatcagctacttgg

SEQ ID NO: 160763 - DNA, 20 bp, Homo sapiens
  source 1..20: mol_type = genomic DNA
ttggctatcagctacttggc

SEQ ID NO: 160764 - DNA, 20 bp, Homo sapiens
  source 1..20: mol_type = genomic DNA
tggctatcagctacttggct

SEQ ID NO: 160765 - DNA, 20 bp, Homo sapiens
  source 1..20: mol_type = genomic DNA
ggctatcagctacttggctt

SEQ ID NO: 160766 - DNA, 20 bp, Homo sapiens
  source 1..20: mol_type = genomic DNA
gctatcagctacttggcttg

SEQ ID NO: 160767 - DNA, 20 bp, Homo sapiens
  source 1..20: mol_type = genomic DNA
ctatcagctacttggcttgg

SEQ ID NO: 160768 - DNA, 20 bp, Homo sapiens
  source 1..20: mol_type = genomic DNA
tatcagctacttggcttggc

SEQ ID NO: 160769 - DNA, 20 bp, Homo sapiens
  source 1..20: mol_type = genomic DNA
atcagctacttggcttggcc

SEQ ID NO: 160770 - DNA, 20 bp, Homo sapiens
  source 1..20: mol_type = genomic DNA
tcagctacttggcttggcct

SEQ ID NO: 160771 - DNA, 20 bp, Homo sapiens
  source 1..20: mol_type = genomic DNA
cagctacttggcttggccta

SEQ ID NO: 160772 - DNA, 20 bp, Homo sapiens
  source 1..20: mol_type = genomic DNA
agctacttggcttggcctat

SEQ ID NO: 160773 - DNA, 20 bp, Homo sapiens
  source 1..20: mol_type = genomic DNA
gctacttggcttggcctatt

SEQ ID NO: 160774 - DNA, 20 bp, Homo sapiens
  source 1..20: mol_type = genomic DNA
ctacttggcttggcctattc

SEQ ID NO: 160775 - DNA, 20 bp, Homo sapiens
  source 1..20: mol_type = genomic DNA
tacttggcttggcctattcc

SEQ ID NO: 160776 - DNA, 20 bp, Homo sapiens
  source 1..20: mol_type = genomic DNA
acttggcttggcctattccg

SEQ ID NO: 160777 - DNA, 20 bp, Homo sapiens
  source 1..20: mol_type = genomic DNA
cttggcttggcctattccgt

SEQ ID NO: 160778 - DNA, 20 bp, Homo sapiens
  source 1..20: mol_type = genomic DNA
ttggcttggcctattccgtg

SEQ ID NO: 160779 - DNA, 20 bp, Homo sapiens
  source 1..20: mol_type = genomic DNA
tggcttggcctattccgtgt

SEQ ID NO: 160780 - DNA, 20 bp, Homo sapiens
  source 1..20: mol_type = genomic DNA
ggcttggcctattccgtgtt

SEQ ID NO: 160781 - DNA, 20 bp, Homo sapiens
  source 1..20: mol_type = genomic DNA
gcttggcctattccgtgttt

SEQ ID NO: 160782 - DNA, 20 bp, Homo sapiens
  source 1..20: mol_type = genomic DNA
cttggcctattccgtgttta

SEQ ID NO: 160783 - DNA, 20 bp, Homo sapiens
  source 1..20: mol_type = genomic DNA
ttggcctattccgtgtttaa

SEQ ID NO: 160784 - DNA, 20 bp, Homo sapiens
  source 1..20: mol_type = genomic DNA
tggcctattccgtgtttaaa

SEQ ID NO: 160785 - DNA, 20 bp, Homo sapiens
  source 1..20: mol_type = genomic DNA
ggcctattccgtgtttaaaa

SEQ ID NO: 160786 - DNA, 20 bp, Homo sapiens
  source 1..20: mol_type = genomic DNA
gcctattccgtgtttaaaat

SEQ ID NO: 160787 - DNA, 20 bp, Homo sapiens
  source 1..20: mol_type = genomic DNA
cctattccgtgtttaaaatc

SEQ ID NO: 160788 - DNA, 20 bp, Homo sapiens
  source 1..20: mol_type = genomic DNA
ctattccgtgtttaaaatct

SEQ ID NO: 160789 - DNA, 20 bp, Homo sapiens
  source 1..20: mol_type = genomic DNA
tattccgtgtttaaaatctt

SEQ ID NO: 160790 - DNA, 20 bp, Homo sapiens
  source 1..20: mol_type = genomic DNA
attccgtgtttaaaatcttg

SEQ ID NO: 160791 - DNA, 20 bp, Homo sapiens
  source 1..20: mol_type = genomic DNA
ttccgtgtttaaaatcttgg

SEQ ID NO: 160792 - DNA, 20 bp, Homo sapiens
  source 1..20: mol_type = genomic DNA
tccgtgtttaaaatcttgga

SEQ ID NO: 160793 - DNA, 20 bp, Homo sapiens
  source 1..20: mol_type = genomic DNA
ccgtgtttaaaatcttggac

SEQ ID NO: 160794 - DNA, 20 bp, Homo sapiens
  source 1..20: mol_type = genomic DNA
cgtgtttaaaatcttggact

SEQ ID NO: 160795 - DNA, 20 bp, Homo sapiens
  source 1..20: mol_type = genomic DNA
gtgtttaaaatcttggactc

SEQ ID NO: 160796 - DNA, 20 bp, Homo sapiens
  source 1..20: mol_type = genomic DNA
tgtttaaaatcttggactct

SEQ ID NO: 160797 - DNA, 20 bp, Homo sapiens
  source 1..20: mol_type = genomic DNA
gtttaaaatcttggactctt

SEQ ID NO: 160798 - DNA, 20 bp, Homo sapiens
  source 1..20: mol_type = genomic DNA
tttaaaatcttggactcttt

SEQ ID NO: 160799 - DNA, 20 bp, Homo sapiens
  source 1..20: mol_type = genomic DNA
ttaaaatcttggactctttg

SEQ ID NO: 160800 - DNA, 20 bp, Homo sapiens
  source 1..20: mol_type = genomic DNA
taaaatcttggactctttgc

SEQ ID NO: 160801 - DNA, 20 bp, Homo sapiens
  source 1..20: mol_type = genomic DNA
aaaatcttggactctttgct

SEQ ID NO: 160802 - DNA, 20 bp, Homo sapiens
  source 1..20: mol_type = genomic DNA
aaatcttggactctttgcta

SEQ ID NO: 160803 - DNA, 20 bp, Homo sapiens
  source 1..20: mol_type = genomic DNA
aatcttggactctttgctag

SEQ ID NO: 160804 - DNA, 20 bp, Homo sapiens
  source 1..20: mol_type = genomic DNA
atcttggactctttgctagt

SEQ ID NO: 160805 - DNA, 20 bp, Homo sapiens
  source 1..20: mol_type = genomic DNA
tcttggactctttgctagtt

SEQ ID NO: 160806 - DNA, 20 bp, Homo sapiens
  source 1..20: mol_type = genomic DNA
cttggactctttgctagttt

SEQ ID NO: 160807 - DNA, 20 bp, Homo sapiens
  source 1..20: mol_type = genomic DNA
ttggactctttgctagtttt

SEQ ID NO: 160808 - DNA, 20 bp, Homo sapiens
  source 1..20: mol_type = genomic DNA
tggactctttgctagttttt

SEQ ID NO: 160809 - DNA, 20 bp, Homo sapiens
  source 1..20: mol_type = genomic DNA
ggactctttgctagttttta

SEQ ID NO: 160810 - DNA, 20 bp, Homo sapiens
  source 1..20: mol_type = genomic DNA
gactctttgctagtttttac

SEQ ID NO: 160811 - DNA, 20 bp, Homo sapiens
  source 1..20: mol_type = genomic DNA
actctttgctagtttttaca

SEQ ID NO: 160812 - DNA, 20 bp, Homo sapiens
  source 1..20: mol_type = genomic DNA
ctctttgctagtttttacag

SEQ ID NO: 160813 - DNA, 20 bp, Homo sapiens
  source 1..20: mol_type = genomic DNA
tctttgctagtttttacaga

SEQ ID NO: 160814 - DNA, 20 bp, Homo sapiens
  source 1..20: mol_type = genomic DNA
ctttgctagtttttacagat

SEQ ID NO: 160815 - DNA, 20 bp, Homo sapiens
  source 1..20: mol_type = genomic DNA
tttgctagtttttacagatc

SEQ ID NO: 160816 - DNA, 20 bp, Homo sapiens
  source 1..20: mol_type = genomic DNA
ttgctagtttttacagatca

SEQ ID NO: 160817 - DNA, 20 bp, Homo sapiens
  source 1..20: mol_type = genomic DNA
tgctagtttttacagatcag

SEQ ID NO: 160818 - DNA, 20 bp, Homo sapiens
  source 1..20: mol_type = genomic DNA
gctagtttttacagatcaga

SEQ ID NO: 160819 - DNA, 20 bp, Homo sapiens
  source 1..20: mol_type = genomic DNA
ctagtttttacagatcagaa

SEQ ID NO: 160820 - DNA, 20 bp, Homo sapiens
  source 1..20: mol_type = genomic DNA
tagtttttacagatcagaat

SEQ ID NO: 160821 - DNA, 20 bp, Homo sapiens
  source 1..20: mol_type = genomic DNA
agtttttacagatcagaatt

SEQ ID NO: 160822 - DNA, 20 bp, Homo sapiens
  source 1..20: mol_type = genomic DNA
gtttttacagatcagaattt

SEQ ID NO: 160823 - DNA, 20 bp, Homo sapiens
  source 1..20: mol_type = genomic DNA
tttttacagatcagaatttt

SEQ ID NO: 160824 - DNA, 20 bp, Homo sapiens
  source 1..20: mol_type = genomic DNA
ttttacagatcagaattttt

SEQ ID NO: 160825 - DNA, 20 bp, Homo sapiens
  source 1..20: mol_type = genomic DNA
tttacagatcagaatttttc

SEQ ID NO: 160826 - DNA, 20 bp, Homo sapiens
  source 1..20: mol_type = genomic DNA
ttacagatcagaatttttca

SEQ ID NO: 160827 - DNA, 20 bp, Homo sapiens
  source 1..20: mol_type = genomic DNA
tacagatcagaatttttcac

SEQ ID NO: 160828 - DNA, 20 bp, Homo sapiens
  source 1..20: mol_type = genomic DNA
acagatcagaatttttcacg

SEQ ID NO: 160829 - DNA, 20 bp, Homo sapiens
  source 1..20: mol_type = genomic DNA
cagatcagaatttttcacgt

SEQ ID NO: 160830 - DNA, 20 bp, Homo sapiens
  source 1..20: mol_type = genomic DNA
agatcagaatttttcacgta

SEQ ID NO: 160831 - DNA, 20 bp, Homo sapiens
  source 1..20: mol_type = genomic DNA
gatcagaatttttcacgtat

SEQ ID NO: 160832 - DNA, 20 bp, Homo sapiens
  source 1..20: mol_type = genomic DNA
atcagaatttttcacgtatt

SEQ ID NO: 160833 - DNA, 20 bp, Homo sapiens
  source 1..20: mol_type = genomic DNA
tcagaatttttcacgtatta

SEQ ID NO: 160834 - DNA, 20 bp, Homo sapiens
  source 1..20: mol_type = genomic DNA
cagaatttttcacgtattaa

SEQ ID NO: 160835 - DNA, 20 bp, Homo sapiens
  source 1..20: mol_type = genomic DNA
agaatttttcacgtattaat

SEQ ID NO: 160836 - DNA, 20 bp, Homo sapiens
  source 1..20: mol_type = genomic DNA
gaatttttcacgtattaatc

SEQ ID NO: 160837 - DNA, 20 bp, Homo sapiens
  source 1..20: mol_type = genomic DNA
aatttttcacgtattaatcc

SEQ ID NO: 160838 - DNA, 20 bp, Homo sapiens
  source 1..20: mol_type = genomic DNA
atttttcacgtattaatcca

SEQ ID NO: 160839 - DNA, 20 bp, Homo sapiens
  source 1..20: mol_type = genomic DNA
tttttcacgtattaatccag

SEQ ID NO: 160840 - DNA, 20 bp, Homo sapiens
  source 1..20: mol_type = genomic DNA
ttttcacgtattaatccagt

SEQ ID NO: 160841 - DNA, 20 bp, Homo sapiens
  source 1..20: mol_type = genomic DNA
tttcacgtattaatccagtt

SEQ ID NO: 160842 - DNA, 20 bp, Homo sapiens
  source 1..20: mol_type = genomic DNA
ttcacgtattaatccagttt

SEQ ID NO: 160843 - DNA, 20 bp, Homo sapiens
  source 1..20: mol_type = genomic DNA
tcacgtattaatccagtttt

SEQ ID NO: 160844 - DNA, 20 bp, Homo sapiens
  source 1..20: mol_type = genomic DNA
cacgtattaatccagttttc

SEQ ID NO: 160845 - DNA, 20 bp, Homo sapiens
  source 1..20: mol_type = genomic DNA
acgtattaatccagttttcc

SEQ ID NO: 160846 - DNA, 20 bp, Homo sapiens
  source 1..20: mol_type = genomic DNA
cgtattaatccagttttcct

SEQ ID NO: 160847 - DNA, 20 bp, Homo sapiens
  source 1..20: mol_type = genomic DNA
gtattaatccagttttccta

SEQ ID NO: 160848 - DNA, 20 bp, Homo sapiens
  source 1..20: mol_type = genomic DNA
tattaatccagttttcctag

SEQ ID NO: 160849 - DNA, 20 bp, Homo sapiens
  source 1..20: mol_type = genomic DNA
attaatccagttttcctagc

SEQ ID NO: 160850 - DNA, 20 bp, Homo sapiens
  source 1..20: mol_type = genomic DNA
ttaatccagttttcctagct

SEQ ID NO: 160851 - DNA, 20 bp, Homo sapiens
  source 1..20: mol_type = genomic DNA
taatccagttttcctagctt

SEQ ID NO: 160852 - DNA, 20 bp, Homo sapiens
  source 1..20: mol_type = genomic DNA
aatccagttttcctagcttc

SEQ ID NO: 160853 - DNA, 20 bp, Homo sapiens
  source 1..20: mol_type = genomic DNA
atccagttttcctagcttct

SEQ ID NO: 160854 - DNA, 20 bp, Homo sapiens
  source 1..20: mol_type = genomic DNA
tccagttttcctagcttctc

SEQ ID NO: 160855 - DNA, 20 bp, Homo sapiens
  source 1..20: mol_type = genomic DNA
ccagttttcctagcttctct

SEQ ID NO: 160856 - DNA, 20 bp, Homo sapiens
  source 1..20: mol_type = genomic DNA
cagttttcctagcttctctt

SEQ ID NO: 160857 - DNA, 20 bp, Homo sapiens
  source 1..20: mol_type = genomic DNA
agttttcctagcttctcttg

SEQ ID NO: 160858 - DNA, 20 bp, Homo sapiens
  source 1..20: mol_type = genomic DNA
gttttcctagcttctcttga

SEQ ID NO: 160859 - DNA, 20 bp, Homo sapiens
  source 1..20: mol_type = genomic DNA
ttttcctagcttctcttgaa

SEQ ID NO: 160860 - DNA, 20 bp, Homo sapiens
  source 1..20: mol_type = genomic DNA
tttcctagcttctcttgaag

SEQ ID NO: 160861 - DNA, 20 bp, Homo sapiens
  source 1..20: mol_type = genomic DNA
ttcctagcttctcttgaaga

SEQ ID NO: 160862 - DNA, 20 bp, Homo sapiens
  source 1..20: mol_type = genomic DNA
tcctagcttctcttgaagaa

SEQ ID NO: 160863 - DNA, 20 bp, Homo sapiens
  source 1..20: mol_type = genomic DNA
cctagcttctcttgaagaat

SEQ ID NO: 160864 - DNA, 20 bp, Homo sapiens
  source 1..20: mol_type = genomic DNA
ctagcttctcttgaagaatt

SEQ ID NO: 160865 - DNA, 20 bp, Homo sapiens
  source 1..20: mol_type = genomic DNA
tagcttctcttgaagaattt

SEQ ID NO: 160866 - DNA, 20 bp, Homo sapiens
  source 1..20: mol_type = genomic DNA
agcttctcttgaagaatttt

SEQ ID NO: 160867 - DNA, 20 bp, Homo sapiens
  source 1..20: mol_type = genomic DNA
gcttctcttgaagaattttt

SEQ ID NO: 160868 - DNA, 20 bp, Homo sapiens
  source 1..20: mol_type = genomic DNA
cttctcttgaagaatttttg

SEQ ID NO: 160869 - DNA, 20 bp, Homo sapiens
  source 1..20: mol_type = genomic DNA
ttctcttgaagaatttttgg

SEQ ID NO: 160870 - DNA, 20 bp, Homo sapiens
  source 1..20: mol_type = genomic DNA
tctcttgaagaatttttgga

SEQ ID NO: 160871 - DNA, 20 bp, Homo sapiens
  source 1..20: mol_type = genomic DNA
ctcttgaagaatttttggag

SEQ ID NO: 160872 - DNA, 20 bp, Homo sapiens
  source 1..20: mol_type = genomic DNA
tcttgaagaatttttggaga

SEQ ID NO: 160873 - DNA, 20 bp, Homo sapiens
  source 1..20: mol_type = genomic DNA
cttgaagaatttttggagat

SEQ ID NO: 160874 - DNA, 20 bp, Homo sapiens
  source 1..20: mol_type = genomic DNA
ttgaagaatttttggagatc

SEQ ID NO: 160875 - DNA, 20 bp, Homo sapiens
  source 1..20: mol_type = genomic DNA
tgaagaatttttggagatct

SEQ ID NO: 160876 - DNA, 20 bp, Homo sapiens
  source 1..20: mol_type = genomic DNA
gaagaatttttggagatctc

SEQ ID NO: 160877 - DNA, 20 bp, Homo sapiens
  source 1..20: mol_type = genomic DNA
aagaatttttggagatctct

SEQ ID NO: 160878 - DNA, 20 bp, Homo sapiens
  source 1..20: mol_type = genomic DNA
agaatttttggagatctctt

SEQ ID NO: 160879 - DNA, 20 bp, Homo sapiens
  source 1..20: mol_type = genomic DNA
gaatttttggagatctcttc

SEQ ID NO: 160880 - DNA, 20 bp, Homo sapiens
  source 1..20: mol_type = genomic DNA
aatttttggagatctcttca

SEQ ID NO: 160881 - DNA, 20 bp, Homo sapiens
  source 1..20: mol_type = genomic DNA
atttttggagatctcttcat

SEQ ID NO: 160882 - DNA, 20 bp, Homo sapiens
  source 1..20: mol_type = genomic DNA
tttttggagatctcttcata

SEQ ID NO: 160883 - DNA, 20 bp, Homo sapiens
  source 1..20: mol_type = genomic DNA
ttttggagatctcttcatac

SEQ ID NO: 160884 - DNA, 20 bp, Homo sapiens
  source 1..20: mol_type = genomic DNA
tttggagatctcttcatact

SEQ ID NO: 160885 - DNA, 20 bp, Homo sapiens
  source 1..20: mol_type = genomic DNA
ttggagatctcttcatactg

SEQ ID NO: 160886 - DNA, 20 bp, Homo sapiens
  source 1..20: mol_type = genomic DNA
tggagatctcttcatactga

SEQ ID NO: 160887 - DNA, 20 bp, Homo sapiens
  source 1..20: mol_type = genomic DNA
ggagatctcttcatactgag

SEQ ID NO: 160888 - DNA, 20 bp, Homo sapiens
  source 1..20: mol_type = genomic DNA
gagatctcttcatactgagc

SEQ ID NO: 160889 - DNA, 20 bp, Homo sapiens
  source 1..20: mol_type = genomic DNA
agatctcttcatactgagcc

SEQ ID NO: 160890 - DNA, 20 bp, Homo sapiens
  source 1..20: mol_type = genomic DNA
gatctcttcatactgagcct

SEQ ID NO: 160891 - DNA, 20 bp, Homo sapiens
  source 1..20: mol_type = genomic DNA
atctcttcatactgagcctt

SEQ ID NO: 160892 - DNA, 20 bp, Homo sapiens
  source 1..20: mol_type = genomic DNA
tctcttcatactgagccttc

SEQ ID NO: 160893 - DNA, 20 bp, Homo sapiens
  source 1..20: mol_type = genomic DNA
ctcttcatactgagccttca

SEQ ID NO: 160894 - DNA, 20 bp, Homo sapiens
  source 1..20: mol_type = genomic DNA
tcttcatactgagccttcat

SEQ ID NO: 160895 - DNA, 20 bp, Homo sapiens
  source 1..20: mol_type = genomic DNA
cttcatactgagccttcatt

SEQ ID NO: 160896 - DNA, 20 bp, Homo sapiens
  source 1..20: mol_type = genomic DNA
ttcatactgagccttcatta

SEQ ID NO: 160897 - DNA, 20 bp, Homo sapiens
  source 1..20: mol_type = genomic DNA
tcatactgagccttcattag

SEQ ID NO: 160898 - DNA, 20 bp, Homo sapiens
  source 1..20: mol_type = genomic DNA
catactgagccttcattagc

SEQ ID NO: 160899 - DNA, 20 bp, Homo sapiens
  source 1..20: mol_type = genomic DNA
atactgagccttcattagcc

SEQ ID NO: 160900 - DNA, 20 bp, Homo sapiens
  source 1..20: mol_type = genomic DNA
tactgagccttcattagccc

SEQ ID NO: 160901 - DNA, 20 bp, Homo sapiens
  source 1..20: mol_type = genomic DNA
actgagccttcattagccca

SEQ ID NO: 160902 - DNA, 20 bp, Homo sapiens
  source 1..20: mol_type = genomic DNA
ctgagccttcattagcccag

SEQ ID NO: 160903 - DNA, 20 bp, Homo sapiens
  source 1..20: mol_type = genomic DNA
tgagccttcattagcccagg

SEQ ID NO: 160904 - DNA, 20 bp, Homo sapiens
  source 1..20: mol_type = genomic DNA
gagccttcattagcccagga

SEQ ID NO: 160905 - DNA, 20 bp, Homo sapiens
  source 1..20: mol_type = genomic DNA
agccttcattagcccaggac

SEQ ID NO: 160906 - DNA, 20 bp, Homo sapiens
  source 1..20: mol_type = genomic DNA
gccttcattagcccaggaca

SEQ ID NO: 160907 - DNA, 20 bp, Homo sapiens
  source 1..20: mol_type = genomic DNA
ccttcattagcccaggacag

SEQ ID NO: 160908 - DNA, 20 bp, Homo sapiens
  source 1..20: mol_type = genomic DNA
cttcattagcccaggacagt

SEQ ID NO: 160909 - DNA, 20 bp, Homo sapiens
  source 1..20: mol_type = genomic DNA
ttcattagcccaggacagta

SEQ ID NO: 160910 - DNA, 20 bp, Homo sapiens
  source 1..20: mol_type = genomic DNA
tcattagcccaggacagtac

SEQ ID NO: 160911 - DNA, 20 bp, Homo sapiens
  source 1..20: mol_type = genomic DNA
cattagcccaggacagtact

SEQ ID NO: 160912 - DNA, 20 bp, Homo sapiens
  source 1..20: mol_type = genomic DNA
attagcccaggacagtactg

SEQ ID NO: 160913 - DNA, 20 bp, Homo sapiens
  source 1..20: mol_type = genomic DNA
ttagcccaggacagtactgc

SEQ ID NO: 160914 - DNA, 20 bp, Homo sapiens
  source 1..20: mol_type = genomic DNA
tagcccaggacagtactgct

SEQ ID NO: 160915 - DNA, 20 bp, Homo sapiens
  source 1..20: mol_type = genomic DNA
agcccaggacagtactgctg

SEQ ID NO: 160916 - DNA, 20 bp, Homo sapiens
  source 1..20: mol_type = genomic DNA
gcccaggacagtactgctgt

SEQ ID NO: 160917 - DNA, 20 bp, Homo sapiens
  source 1..20: mol_type = genomic DNA
cccaggacagtactgctgta

SEQ ID NO: 160918 - DNA, 20 bp, Homo sapiens
  source 1..20: mol_type = genomic DNA
ccaggacagtactgctgtag

SEQ ID NO: 160919 - DNA, 20 bp, Homo sapiens
  source 1..20: mol_type = genomic DNA
caggacagtactgctgtagc

SEQ ID NO: 160920 - DNA, 20 bp, Homo sapiens
  source 1..20: mol_type = genomic DNA
aggacagtactgctgtagca

SEQ ID NO: 160921 - DNA, 20 bp, Homo sapiens
  source 1..20: mol_type = genomic DNA
ggacagtactgctgtagcag

SEQ ID NO: 160922 - DNA, 20 bp, Homo sapiens
  source 1..20: mol_type = genomic DNA
gacagtactgctgtagcagt

SEQ ID NO: 160923 - DNA, 20 bp, Homo sapiens
  source 1..20: mol_type = genomic DNA
acagtactgctgtagcagtt

SEQ ID NO: 160924 - DNA, 20 bp, Homo sapiens
  source 1..20: mol_type = genomic DNA
cagtactgctgtagcagttc

SEQ ID NO: 160925 - DNA, 20 bp, Homo sapiens
  source 1..20: mol_type = genomic DNA
agtactgctgtagcagttca

SEQ ID NO: 160926 - DNA, 20 bp, Homo sapiens
  source 1..20: mol_type = genomic DNA
gtactgctgtagcagttcat

SEQ ID NO: 160927 - DNA, 20 bp, Homo sapiens
  source 1..20: mol_type = genomic DNA
tactgctgtagcagttcata

SEQ ID NO: 160928 - DNA, 20 bp, Homo sapiens
  source 1..20: mol_type = genomic DNA
actgctgtagcagttcatat

SEQ ID NO: 160929 - DNA, 20 bp, Homo sapiens
  source 1..20: mol_type = genomic DNA
ctgctgtagcagttcatata

SEQ ID NO: 160930 - DNA, 20 bp, Homo sapiens
  source 1..20: mol_type = genomic DNA
tgctgtagcagttcatatat

SEQ ID NO: 160931 - DNA, 20 bp, Homo sapiens
  source 1..20: mol_type = genomic DNA
gctgtagcagttcatatatt

SEQ ID NO: 160932 - DNA, 20 bp, Homo sapiens
  source 1..20: mol_type = genomic DNA
ctgtagcagttcatatattt

SEQ ID NO: 160933 - DNA, 20 bp, Homo sapiens
  source 1..20: mol_type = genomic DNA
tgtagcagttcatatatttt

SEQ ID NO: 160934 - DNA, 20 bp, Homo sapiens
  source 1..20: mol_type = genomic DNA
gtagcagttcatatattttt

SEQ ID NO: 160935 - DNA, 20 bp, Homo sapiens
  source 1..20: mol_type = genomic DNA
tagcagttcatatatttttt

SEQ ID NO: 160936 - DNA, 20 bp, Homo sapiens
  source 1..20: mol_type = genomic DNA
agcagttcatatattttttc

SEQ ID NO: 160937 - DNA, 20 bp, Homo sapiens
  source 1..20: mol_type = genomic DNA
gcagttcatatattttttcg

SEQ ID NO: 160938 - DNA, 20 bp, Homo sapiens
  source 1..20: mol_type = genomic DNA
cagttcatatattttttcgc

SEQ ID NO: 160939 - DNA, 20 bp, Homo sapiens
  source 1..20: mol_type = genomic DNA
agttcatatattttttcgct

SEQ ID NO: 160940 - DNA, 20 bp, Homo sapiens
  source 1..20: mol_type = genomic DNA
gttcatatattttttcgctt

SEQ ID NO: 160941 - DNA, 20 bp, Homo sapiens
  source 1..20: mol_type = genomic DNA
ttcatatattttttcgcttc

SEQ ID NO: 160942 - DNA, 20 bp, Homo sapiens
  source 1..20: mol_type = genomic DNA
tcatatattttttcgcttcc

SEQ ID NO: 160943 - DNA, 20 bp, Homo sapiens
  source 1..20: mol_type = genomic DNA
catatattttttcgcttccc

SEQ ID NO: 160944 - DNA, 20 bp, Homo sapiens
  source 1..20: mol_type = genomic DNA
atatattttttcgcttccca

SEQ ID NO: 160945 - DNA, 20 bp, Homo sapiens
  source 1..20: mol_type = genomic DNA
tatattttttcgcttcccag

SEQ ID NO: 160946 - DNA, 20 bp, Homo sapiens
  source 1..20: mol_type = genomic DNA
atattttttcgcttcccagg

SEQ ID NO: 160947 - DNA, 20 bp, Homo sapiens
  source 1..20: mol_type = genomic DNA
tattttttcgcttcccaggc

SEQ ID NO: 160948 - DNA, 20 bp, Homo sapiens
  source 1..20: mol_type = genomic DNA
attttttcgcttcccaggcc

SEQ ID NO: 160949 - DNA, 20 bp, Homo sapiens
  source 1..20: mol_type = genomic DNA
ttttttcgcttcccaggcct

SEQ ID NO: 160950 - DNA, 20 bp, Homo sapiens
  source 1..20: mol_type = genomic DNA
tttttcgcttcccaggcctg

SEQ ID NO: 160951 - DNA, 20 bp, Homo sapiens
  source 1..20: mol_type = genomic DNA
ttttcgcttcccaggcctgt

SEQ ID NO: 160952 - DNA, 20 bp, Homo sapiens
  source 1..20: mol_type = genomic DNA
tttcgcttcccaggcctgtg

SEQ ID NO: 160953 - DNA, 20 bp, Homo sapiens
  source 1..20: mol_type = genomic DNA
ttcgcttcccaggcctgtgt

SEQ ID NO: 160954 - DNA, 20 bp, Homo sapiens
  source 1..20: mol_type = genomic DNA
tcgcttcccaggcctgtgtt

SEQ ID NO: 160955 - DNA, 20 bp, Homo sapiens
  source 1..20: mol_type = genomic DNA
cgcttcccaggcctgtgtta

SEQ ID NO: 160956 - DNA, 20 bp, Homo sapiens
  source 1..20: mol_type = genomic DNA
gcttcccaggcctgtgttat

SEQ ID NO: 160957 - DNA, 20 bp, Homo sapiens
  source 1..20: mol_type = genomic DNA
cttcccaggcctgtgttatt

SEQ ID NO: 160958 - DNA, 20 bp, Homo sapiens
  source 1..20: mol_type = genomic DNA
ttcccaggcctgtgttattc

SEQ ID NO: 160959 - DNA, 20 bp, Homo sapiens
  source 1..20: mol_type = genomic DNA
tcccaggcctgtgttattca

SEQ ID NO: 160960 - DNA, 20 bp, Homo sapiens
  source 1..20: mol_type = genomic DNA
cccaggcctgtgttattcac

SEQ ID NO: 160961 - DNA, 20 bp, Homo sapiens
  source 1..20: mol_type = genomic DNA
ccaggcctgtgttattcact

SEQ ID NO: 160962 - DNA, 20 bp, Homo sapiens
  source 1..20: mol_type = genomic DNA
caggcctgtgttattcactt

SEQ ID NO: 160963 - DNA, 20 bp, Homo sapiens
  source 1..20: mol_type = genomic DNA
aggcctgtgttattcactta

SEQ ID NO: 160964 - DNA, 20 bp, Homo sapiens
  source 1..20: mol_type = genomic DNA
ggcctgtgttattcacttaa

SEQ ID NO: 160965 - DNA, 20 bp, Homo sapiens
  source 1..20: mol_type = genomic DNA
gcctgtgttattcacttaag

SEQ ID NO: 160966 - DNA, 20 bp, Homo sapiens
  source 1..20: mol_type = genomic DNA
cctgtgttattcacttaagt

SEQ ID NO: 160967 - DNA, 20 bp, Homo sapiens
  source 1..20: mol_type = genomic DNA
ctgtgttattcacttaagtt

SEQ ID NO: 160968 - DNA, 20 bp, Homo sapiens
  source 1..20: mol_type = genomic DNA
tgtgttattcacttaagttc

SEQ ID NO: 160969 - DNA, 20 bp, Homo sapiens
  source 1..20: mol_type = genomic DNA
gtgttattcacttaagttca

SEQ ID NO: 160970 - DNA, 20 bp, Homo sapiens
  source 1..20: mol_type = genomic DNA
tgttattcacttaagttcat

SEQ ID NO: 160971 - DNA, 20 bp, Homo sapiens
  source 1..20: mol_type = genomic DNA
gttattcacttaagttcata

SEQ ID NO: 160972 - DNA, 20 bp, Homo sapiens
  source 1..20: mol_type = genomic DNA
ttattcacttaagttcatag

SEQ ID NO: 160973 - DNA, 20 bp, Homo sapiens
  source 1..20: mol_type = genomic DNA
tattcacttaagttcatagc

SEQ ID NO: 160974 - DNA, 20 bp, Homo sapiens
  source 1..20: mol_type = genomic DNA
attcacttaagttcatagcc

SEQ ID NO: 160975 - DNA, 20 bp, Homo sapiens
  source 1..20: mol_type = genomic DNA
ttcacttaagttcatagcct

SEQ ID NO: 160976 - DNA, 20 bp, Homo sapiens
  source 1..20: mol_type = genomic DNA
tcacttaagttcatagcctg

SEQ ID NO: 160977 - DNA, 20 bp, Homo sapiens
  source 1..20: mol_type = genomic DNA
cacttaagttcatagcctgg

SEQ ID NO: 160978 - DNA, 20 bp, Homo sapiens
  source 1..20: mol_type = genomic DNA
acttaagttcatagcctggt

SEQ ID NO: 160979 - DNA, 20 bp, Homo sapiens
  source 1..20: mol_type = genomic DNA
cttaagttcatagcctggtc

SEQ ID NO: 160980 - DNA, 20 bp, Homo sapiens
  source 1..20: mol_type = genomic DNA
ttaagttcatagcctggtcc

SEQ ID NO: 160981 - DNA, 20 bp, Homo sapiens
  source 1..20: mol_type = genomic DNA
taagttcatagcctggtccc

SEQ ID NO: 160982 - DNA, 20 bp, Homo sapiens
  source 1..20: mol_type = genomic DNA
aagttcatagcctggtccct

SEQ ID NO: 160983 - DNA, 20 bp, Homo sapiens
  source 1..20: mol_type = genomic DNA
agttcatagcctggtccctg

SEQ ID NO: 160984 - DNA, 20 bp, Homo sapiens
  source 1..20: mol_type = genomic DNA
gttcatagcctggtccctgc

SEQ ID NO: 160985 - DNA, 20 bp, Homo sapiens
  source 1..20: mol_type = genomic DNA
ttcatagcctggtccctgca

SEQ ID NO: 160986 - DNA, 20 bp, Homo sapiens
  source 1..20: mol_type = genomic DNA
tcatagcctggtccctgcag

SEQ ID NO: 160987 - DNA, 20 bp, Homo sapiens
  source 1..20: mol_type = genomic DNA
catagcctggtccctgcagg

SEQ ID NO: 160988 - DNA, 20 bp, Homo sapiens
  source 1..20: mol_type = genomic DNA
atagcctggtccctgcaggg

SEQ ID NO: 160989 - DNA, 20 bp, Homo sapiens
  source 1..20: mol_type = genomic DNA
tagcctggtccctgcagggt

SEQ ID NO: 160990 - DNA, 20 bp, Homo sapiens
  source 1..20: mol_type = genomic DNA
agcctggtccctgcagggtt

SEQ ID NO: 160991 - DNA, 20 bp, Homo sapiens
  source 1..20: mol_type = genomic DNA
gcctggtccctgcagggttg

SEQ ID NO: 160992 - DNA, 20 bp, Homo sapiens
  source 1..20: mol_type = genomic DNA
cctggtccctgcagggttgt

SEQ ID NO: 160993 - DNA, 20 bp, Homo sapiens
  source 1..20: mol_type = genomic DNA
ctggtccctgcagggttgta

SEQ ID NO: 160994 - DNA, 20 bp, Homo sapiens
  source 1..20: mol_type = genomic DNA
tggtccctgcagggttgtac

SEQ ID NO: 160995 - DNA, 20 bp, Homo sapiens
  source 1..20: mol_type = genomic DNA
ggtccctgcagggttgtacc

SEQ ID NO: 160996 - DNA, 20 bp, Homo sapiens
  source 1..20: mol_type = genomic DNA
gtccctgcagggttgtaccc

SEQ ID NO: 160997 - DNA, 20 bp, Homo sapiens
  source 1..20: mol_type = genomic DNA
tccctgcagggttgtacccg

SEQ ID NO: 160998 - DNA, 20 bp, Homo sapiens
  source 1..20: mol_type = genomic DNA
ccctgcagggttgtacccga

SEQ ID NO: 160999 - DNA, 20 bp, Homo sapiens
  source 1..20: mol_type = genomic DNA
cctgcagggttgtacccgag

SEQ ID NO: 161000 - DNA, 20 bp, Homo sapiens
  source 1..20: mol_type = genomic DNA
ctgcagggttgtacccgagc

SEQ ID NO: 161001 - DNA, 20 bp, Homo sapiens
  source 1..20: mol_type = genomic DNA
tgcagggttgtacccgagca

SEQ ID NO: 161002 - DNA, 20 bp, Homo sapiens
  source 1..20: mol_type = genomic DNA
gcagggttgtacccgagcac

SEQ ID NO: 161003 - DNA, 20 bp, Homo sapiens
  source 1..20: mol_type = genomic DNA
cagggttgtacccgagcaca

SEQ ID NO: 161004 - DNA, 20 bp, Homo sapiens
  source 1..20: mol_type = genomic DNA
agggttgtacccgagcacag

SEQ ID NO: 161005 - DNA, 20 bp, Homo sapiens
  source 1..20: mol_type = genomic DNA
gggttgtacccgagcacagc

SEQ ID NO: 161006 - DNA, 20 bp, Homo sapiens
  source 1..20: mol_type = genomic DNA
ggttgtacccgagcacagct

SEQ ID NO: 161007 - DNA, 20 bp, Homo sapiens
  source 1..20: mol_type = genomic DNA
gttgtacccgagcacagcta

SEQ ID NO: 161008 - DNA, 20 bp, Homo sapiens
  source 1..20: mol_type = genomic DNA
ttgtacccgagcacagctac

SEQ ID NO: 161009 - DNA, 20 bp, Homo sapiens
  source 1..20: mol_type = genomic DNA
tgtacccgagcacagctact

SEQ ID NO: 161010 - DNA, 20 bp, Homo sapiens
  source 1..20: mol_type = genomic DNA
gtacccgagcacagctactt

SEQ ID NO: 161011 - DNA, 20 bp, Homo sapiens
  source 1..20: mol_type = genomic DNA
tacccgagcacagctactta

SEQ ID NO: 161012 - DNA, 20 bp, Homo sapiens
  source 1..20: mol_type = genomic DNA
acccgagcacagctacttag

SEQ ID NO: 161013 - DNA, 20 bp, Homo sapiens
  source 1..20: mol_type = genomic DNA
cccgagcacagctacttaga

SEQ ID NO: 161014 - DNA, 20 bp, Homo sapiens
  source 1..20: mol_type = genomic DNA
ccgagcacagctacttagat

SEQ ID NO: 161015 - DNA, 20 bp, Homo sapiens
  source 1..20: mol_type = genomic DNA
cgagcacagctacttagatg

SEQ ID NO: 161016 - DNA, 20 bp, Homo sapiens
  source 1..20: mol_type = genomic DNA
gagcacagctacttagatgt

SEQ ID NO: 161017 - DNA, 20 bp, Homo sapiens
  source 1..20: mol_type = genomic DNA
agcacagctacttagatgtc

SEQ ID NO: 161018 - DNA, 20 bp, Homo sapiens
  source 1..20: mol_type = genomic DNA
gcacagctacttagatgtcc

SEQ ID NO: 161019 - DNA, 20 bp, Homo sapiens
  source 1..20: mol_type = genomic DNA
cacagctacttagatgtcct

SEQ ID NO: 161020 - DNA, 20 bp, Homo sapiens
  source 1..20: mol_type = genomic DNA
acagctacttagatgtcctg

SEQ ID NO: 161021 - DNA, 20 bp, Homo sapiens
  source 1..20: mol_type = genomic DNA
cagctacttagatgtcctga

SEQ ID NO: 161022 - DNA, 20 bp, Homo sapiens
  source 1..20: mol_type = genomic DNA
agctacttagatgtcctgaa

SEQ ID NO: 161023 - DNA, 20 bp, Homo sapiens
  source 1..20: mol_type = genomic DNA
gctacttagatgtcctgaat

SEQ ID NO: 161024 - DNA, 20 bp, Homo sapiens
  source 1..20: mol_type = genomic DNA
ctacttagatgtcctgaatg

SEQ ID NO: 161025 - DNA, 20 bp, Homo sapiens
  source 1..20: mol_type = genomic DNA
tacttagatgtcctgaatgt

SEQ ID NO: 161026 - DNA, 20 bp, Homo sapiens
  source 1..20: mol_type = genomic DNA
acttagatgtcctgaatgta

SEQ ID NO: 161027 - DNA, 20 bp, Homo sapiens
  source 1..20: mol_type = genomic DNA
cttagatgtcctgaatgtat

SEQ ID NO: 161028 - DNA, 20 bp, Homo sapiens
  source 1..20: mol_type = genomic DNA
ttagatgtcctgaatgtatt

SEQ ID NO: 161029 - DNA, 20 bp, Homo sapiens
  source 1..20: mol_type = genomic DNA
tagatgtcctgaatgtatta

SEQ ID NO: 161030 - DNA, 20 bp, Homo sapiens
  source 1..20: mol_type = genomic DNA
agatgtcctgaatgtattac

SEQ ID NO: 161031 - DNA, 20 bp, Homo sapiens
  source 1..20: mol_type = genomic DNA
gatgtcctgaatgtattacc

SEQ ID NO: 161032 - DNA, 20 bp, Homo sapiens
  source 1..20: mol_type = genomic DNA
atgtcctgaatgtattaccg

SEQ ID NO: 161033 - DNA, 20 bp, Homo sapiens
  source 1..20: mol_type = genomic DNA
tgtcctgaatgtattaccgg

SEQ ID NO: 161034 - DNA, 20 bp, Homo sapiens
  source 1..20: mol_type = genomic DNA
gtcctgaatgtattaccggt

SEQ ID NO: 161035 - DNA, 20 bp, Homo sapiens
  source 1..20: mol_type = genomic DNA
tcctgaatgtattaccggtt

SEQ ID NO: 161036 - DNA, 20 bp, Homo sapiens
  source 1..20: mol_type = genomic DNA
cctgaatgtattaccggtta

SEQ ID NO: 161037 - DNA, 20 bp, Homo sapiens
  source 1..20: mol_type = genomic DNA
ctgaatgtattaccggttaa

SEQ ID NO: 161038 - DNA, 20 bp, Homo sapiens
  source 1..20: mol_type = genomic DNA
tgaatgtattaccggttaaa

SEQ ID NO: 161039 - DNA, 20 bp, Homo sapiens
  source 1..20: mol_type = genomic DNA
gaatgtattaccggttaaat

SEQ ID NO: 161040 - DNA, 20 bp, Homo sapiens
  source 1..20: mol_type = genomic DNA
aatgtattaccggttaaatg

SEQ ID NO: 161041 - DNA, 20 bp, Homo sapiens
  source 1..20: mol_type = genomic DNA
atgtattaccggttaaatgg

SEQ ID NO: 161042 - DNA, 20 bp, Homo sapiens
  source 1..20: mol_type = genomic DNA
tgtattaccggttaaatgga

SEQ ID NO: 161043 - DNA, 20 bp, Homo sapiens
  source 1..20: mol_type = genomic DNA
gtattaccggttaaatggag

SEQ ID NO: 161044 - DNA, 20 bp, Homo sapiens
  source 1..20: mol_type = genomic DNA
tattaccggttaaatggagg

SEQ ID NO: 161045 - DNA, 20 bp, Homo sapiens
  source 1..20: mol_type = genomic DNA
attaccggttaaatggaggt

SEQ ID NO: 161046 - DNA, 20 bp, Homo sapiens
  source 1..20: mol_type = genomic DNA
ttaccggttaaatggaggtt

SEQ ID NO: 161047 - DNA, 20 bp, Homo sapiens
  source 1..20: mol_type = genomic DNA
taccggttaaatggaggttt

SEQ ID NO: 161048 - DNA, 20 bp, Homo sapiens
  source 1..20: mol_type = genomic DNA
accggttaaatggaggtttc

SEQ ID NO: 161049 - DNA, 20 bp, Homo sapiens
  source 1..20: mol_type = genomic DNA
ccggttaaatggaggtttca

SEQ ID NO: 161050 - DNA, 20 bp, Homo sapiens
  source 1..20: mol_type = genomic DNA
cggttaaatggaggtttcaa

SEQ ID NO: 161051 - DNA, 20 bp, Homo sapiens
  source 1..20: mol_type = genomic DNA
ggttaaatggaggtttcaaa

SEQ ID NO: 161052 - DNA, 20 bp, Homo sapiens
  source 1..20: mol_type = genomic DNA
gttaaatggaggtttcaaag

SEQ ID NO: 161053 - DNA, 20 bp, Homo sapiens
  source 1..20: mol_type = genomic DNA
ttaaatggaggtttcaaaga

SEQ ID NO: 161054 - DNA, 20 bp, Homo sapiens
  source 1..20: mol_type = genomic DNA
taaatggaggtttcaaagaa

SEQ ID NO: 161055 - DNA, 20 bp, Homo sapiens
  source 1..20: mol_type = genomic DNA
aaatggaggtttcaaagaac

SEQ ID NO: 161056 - DNA, 20 bp, Homo sapiens
  source 1..20: mol_type = genomic DNA
aatggaggtttcaaagaacc

SEQ ID NO: 161057 - DNA, 20 bp, Homo sapiens
  source 1..20: mol_type = genomic DNA
atggaggtttcaaagaacct

SEQ ID NO: 161058 - DNA, 20 bp, Homo sapiens
  source 1..20: mol_type = genomic DNA
tggaggtttcaaagaacctg

SEQ ID NO: 161059 - DNA, 20 bp, Homo sapiens
  source 1..20: mol_type = genomic DNA
ggaggtttcaaagaacctgc

SEQ ID NO: 161060 - DNA, 20 bp, Homo sapiens
  source 1..20: mol_type = genomic DNA
gaggtttcaaagaacctgct

SEQ ID NO: 161061 - DNA, 20 bp, Homo sapiens
  source 1..20: mol_type = genomic DNA
aggtttcaaagaacctgctg

SEQ ID NO: 161062 - DNA, 20 bp, Homo sapiens
  source 1..20: mol_type = genomic DNA
ggtttcaaagaacctgctgt

SEQ ID NO: 161063 - DNA, 20 bp, Homo sapiens
  source 1..20: mol_type = genomic DNA
gtttcaaagaacctgctgtt

SEQ ID NO: 161064 - DNA, 20 bp, Homo sapiens
  source 1..20: mol_type = genomic DNA
tttcaaagaacctgctgttt

SEQ ID NO: 161065 - DNA, 20 bp, Homo sapiens
  source 1..20: mol_type = genomic DNA
ttcaaagaacctgctgtttt

SEQ ID NO: 161066 - DNA, 20 bp, Homo sapiens
  source 1..20: mol_type = genomic DNA
tcaaagaacctgctgttttt

SEQ ID NO: 161067 - DNA, 20 bp, Homo sapiens
  source 1..20: mol_type = genomic DNA
caaagaacctgctgtttttg

SEQ ID NO: 161068 - DNA, 20 bp, Homo sapiens
  source 1..20: mol_type = genomic DNA
aaagaacctgctgtttttgg

SEQ ID NO: 161069 - DNA, 20 bp, Homo sapiens
  source 1..20: mol_type = genomic DNA
aagaacctgctgtttttggc

SEQ ID NO: 161070 - DNA, 20 bp, Homo sapiens
  source 1..20: mol_type = genomic DNA
agaacctgctgtttttggcc

SEQ ID NO: 161071 - DNA, 20 bp, Homo sapiens
  source 1..20: mol_type = genomic DNA
gaacctgctgtttttggccc

SEQ ID NO: 161072 - DNA, 20 bp, Homo sapiens
  source 1..20: mol_type = genomic DNA
aacctgctgtttttggccct

SEQ ID NO: 161073 - DNA, 20 bp, Homo sapiens
  source 1..20: mol_type = genomic DNA
acctgctgtttttggccctg

SEQ ID NO: 161074 - DNA, 20 bp, Homo sapiens
  source 1..20: mol_type = genomic DNA
cctgctgtttttggccctgt

SEQ ID NO: 161075 - DNA, 20 bp, Homo sapiens
  source 1..20: mol_type = genomic DNA
ctgctgtttttggccctgtg

SEQ ID NO: 161076 - DNA, 20 bp, Homo sapiens
  source 1..20: mol_type = genomic DNA
tgctgtttttggccctgtgc

SEQ ID NO: 161077 - DNA, 20 bp, Homo sapiens
  source 1..20: mol_type = genomic DNA
gctgtttttggccctgtgct

SEQ ID NO: 161078 - DNA, 20 bp, Homo sapiens
  source 1..20: mol_type = genomic DNA
ctgtttttggccctgtgctc

SEQ ID NO: 161079 - DNA, 20 bp, Homo sapiens
  source 1..20: mol_type = genomic DNA
tgtttttggccctgtgctct

SEQ ID NO: 161080 - DNA, 20 bp, Homo sapiens
  source 1..20: mol_type = genomic DNA
gtttttggccctgtgctctt

SEQ ID NO: 161081 - DNA, 20 bp, Homo sapiens
  source 1..20: mol_type = genomic DNA
tttttggccctgtgctcttg

SEQ ID NO: 161082 - DNA, 20 bp, Homo sapiens
  source 1..20: mol_type = genomic DNA
ttttggccctgtgctcttga

SEQ ID NO: 161083 - DNA, 20 bp, Homo sapiens
  source 1..20: mol_type = genomic DNA
tttggccctgtgctcttgat

SEQ ID NO: 161084 - DNA, 20 bp, Homo sapiens
  source 1..20: mol_type = genomic DNA
ttggccctgtgctcttgata

SEQ ID NO: 161085 - DNA, 20 bp, Homo sapiens
  source 1..20: mol_type = genomic DNA
tggccctgtgctcttgataa

SEQ ID NO: 161086 - DNA, 20 bp, Homo sapiens
  source 1..20: mol_type = genomic DNA
ggccctgtgctcttgataac

SEQ ID NO: 161087 - DNA, 20 bp, Homo sapiens
  source 1..20: mol_type = genomic DNA
gccctgtgctcttgataaca

SEQ ID NO: 161088 - DNA, 20 bp, Homo sapiens
  source 1..20: mol_type = genomic DNA
ccctgtgctcttgataacag

SEQ ID NO: 161089 - DNA, 20 bp, Homo sapiens
  source 1..20: mol_type = genomic DNA
cctgtgctcttgataacaga

SEQ ID NO: 161090 - DNA, 20 bp, Homo sapiens
  source 1..20: mol_type = genomic DNA
ctgtgctcttgataacagag

SEQ ID NO: 161091 - DNA, 20 bp, Homo sapiens
  source 1..20: mol_type = genomic DNA
tgtgctcttgataacagagt

SEQ ID NO: 161092 - DNA, 20 bp, Homo sapiens
  source 1..20: mol_type = genomic DNA
gtgctcttgataacagagtg

SEQ ID NO: 161093 - DNA, 20 bp, Homo sapiens
  source 1..20: mol_type = genomic DNA
tgctcttgataacagagtgt

SEQ ID NO: 161094 - DNA, 20 bp, Homo sapiens
  source 1..20: mol_type = genomic DNA
gctcttgataacagagtgtt

SEQ ID NO: 161095 - DNA, 20 bp, Homo sapiens
  source 1..20: mol_type = genomic DNA
ctcttgataacagagtgttt

SEQ ID NO: 161096 - DNA, 20 bp, Homo sapiens
  source 1..20: mol_type = genomic DNA
tcttgataacagagtgtttg

SEQ ID NO: 161097 - DNA, 20 bp, Homo sapiens
  source 1..20: mol_type = genomic DNA
cttgataacagagtgtttga

SEQ ID NO: 161098 - DNA, 20 bp, Homo sapiens
  source 1..20: mol_type = genomic DNA
ttgataacagagtgtttgag

SEQ ID NO: 161099 - DNA, 20 bp, Homo sapiens
  source 1..20: mol_type = genomic DNA
tgataacagagtgtttgagg

SEQ ID NO: 161100 - DNA, 20 bp, Homo sapiens
  source 1..20: mol_type = genomic DNA
gataacagagtgtttgaggg

SEQ ID NO: 161101 - DNA, 20 bp, Homo sapiens
  source 1..20: mol_type = genomic DNA
ataacagagtgtttgaggga

SEQ ID NO: 161102 - DNA, 20 bp, Homo sapiens
  source 1..20: mol_type = genomic DNA
taacagagtgtttgagggac

SEQ ID NO: 161103 - DNA, 20 bp, Homo sapiens
  source 1..20: mol_type = genomic DNA
aacagagtgtttgagggaca

SEQ ID NO: 161104 - DNA, 20 bp, Homo sapiens
  source 1..20: mol_type = genomic DNA
acagagtgtttgagggacaa

SEQ ID NO: 161105 - DNA, 20 bp, Homo sapiens
  source 1..20: mol_type = genomic DNA
cagagtgtttgagggacaac

SEQ ID NO: 161106 - DNA, 20 bp, Homo sapiens
  source 1..20: mol_type = genomic DNA
agagtgtttgagggacaact

SEQ ID NO: 161107 - DNA, 20 bp, Homo sapiens
  source 1..20: mol_type = genomic DNA
gagtgtttgagggacaactt

SEQ ID NO: 161108 - DNA, 20 bp, Homo sapiens
  source 1..20: mol_type = genomic DNA
agtgtttgagggacaacttt

SEQ ID NO: 161109 - DNA, 20 bp, Homo sapiens
  source 1..20: mol_type = genomic DNA
gtgtttgagggacaactttc

SEQ ID NO: 161110 - DNA, 20 bp, Homo sapiens
  source 1..20: mol_type = genomic DNA
tgtttgagggacaactttca

SEQ ID NO: 161111 - DNA, 20 bp, Homo sapiens
  source 1..20: mol_type = genomic DNA
gtttgagggacaactttcac

SEQ ID NO: 161112 - DNA, 20 bp, Homo sapiens
  source 1..20: mol_type = genomic DNA
tttgagggacaactttcaca

SEQ ID NO: 161113 - DNA, 20 bp, Homo sapiens
  source 1..20: mol_type = genomic DNA
ttgagggacaactttcacat

SEQ ID NO: 161114 - DNA, 20 bp, Homo sapiens
  source 1..20: mol_type = genomic DNA
tgagggacaactttcacatt

SEQ ID NO: 161115 - DNA, 20 bp, Homo sapiens
  source 1..20: mol_type = genomic DNA
gagggacaactttcacattt

SEQ ID NO: 161116 - DNA, 20 bp, Homo sapiens
  source 1..20: mol_type = genomic DNA
agggacaactttcacatttg

SEQ ID NO: 161117 - DNA, 20 bp, Homo sapiens
  source 1..20: mol_type = genomic DNA
gggacaactttcacatttga

SEQ ID NO: 161118 - DNA, 20 bp, Homo sapiens
  source 1..20: mol_type = genomic DNA
ggacaactttcacatttgag

SEQ ID NO: 161119 - DNA, 20 bp, Homo sapiens
  source 1..20: mol_type = genomic DNA
gacaactttcacatttgagt

SEQ ID NO: 161120 - DNA, 20 bp, Homo sapiens
  source 1..20: mol_type = genomic DNA
acaactttcacatttgagtt

SEQ ID NO: 161121 - DNA, 20 bp, Homo sapiens
  source 1..20: mol_type = genomic DNA
caactttcacatttgagttt

SEQ ID NO: 161122 - DNA, 20 bp, Homo sapiens
  source 1..20: mol_type = genomic DNA
aactttcacatttgagtttt

SEQ ID NO: 161123 - DNA, 20 bp, Homo sapiens
  source 1..20: mol_type = genomic DNA
actttcacatttgagttttt

SEQ ID NO: 161124 - DNA, 20 bp, Homo sapiens
  source 1..20: mol_type = genomic DNA
ctttcacatttgagtttttc

SEQ ID NO: 161125 - DNA, 20 bp, Homo sapiens
  source 1..20: mol_type = genomic DNA
tttcacatttgagtttttcc

SEQ ID NO: 161126 - DNA, 20 bp, Homo sapiens
  source 1..20: mol_type = genomic DNA
ttcacatttgagtttttcca

SEQ ID NO: 161127 - DNA, 20 bp, Homo sapiens
  source 1..20: mol_type = genomic DNA
tcacatttgagtttttccaa

SEQ ID NO: 161128 - DNA, 20 bp, Homo sapiens
  source 1..20: mol_type = genomic DNA
cacatttgagtttttccaaa

SEQ ID NO: 161129 - DNA, 20 bp, Homo sapiens
  source 1..20: mol_type = genomic DNA
acatttgagtttttccaaaa

SEQ ID NO: 161130 - DNA, 20 bp, Homo sapiens
  source 1..20: mol_type = genomic DNA
catttgagtttttccaaaat

SEQ ID NO: 161131 - DNA, 20 bp, Homo sapiens
  source 1..20: mol_type = genomic DNA
atttgagtttttccaaaatt

SEQ ID NO: 161132 - DNA, 20 bp, Homo sapiens
  source 1..20: mol_type = genomic DNA
tttgagtttttccaaaatta

SEQ ID NO: 161133 - DNA, 20 bp, Homo sapiens
  source 1..20: mol_type = genomic DNA
ttgagtttttccaaaattaa

SEQ ID NO: 161134 - DNA, 20 bp, Homo sapiens
  source 1..20: mol_type = genomic DNA
tgagtttttccaaaattaaa

SEQ ID NO: 161135 - DNA, 20 bp, Homo sapiens
  source 1..20: mol_type = genomic DNA
gagtttttccaaaattaaag

SEQ ID NO: 161136 - DNA, 20 bp, Homo sapiens
  source 1..20: mol_type = genomic DNA
agtttttccaaaattaaagg

SEQ ID NO: 161137 - DNA, 20 bp, Homo sapiens
  source 1..20: mol_type = genomic DNA
gtttttccaaaattaaaggt

SEQ ID NO: 161138 - DNA, 20 bp, Homo sapiens
  source 1..20: mol_type = genomic DNA
tttttccaaaattaaaggtt

SEQ ID NO: 161139 - DNA, 20 bp, Homo sapiens
  source 1..20: mol_type = genomic DNA
ttttccaaaattaaaggttg

SEQ ID NO: 161140 - DNA, 20 bp, Homo sapiens
  source 1..20: mol_type = genomic DNA
tttccaaaattaaaggttgt

SEQ ID NO: 161141 - DNA, 20 bp, Homo sapiens
  source 1..20: mol_type = genomic DNA
ttccaaaattaaaggttgta

SEQ ID NO: 161142 - DNA, 20 bp, Homo sapiens
  source 1..20: mol_type = genomic DNA
tccaaaattaaaggttgtag

SEQ ID NO: 161143 - DNA, 20 bp, Homo sapiens
  source 1..20: mol_type = genomic DNA
ccaaaattaaaggttgtaga

SEQ ID NO: 161144 - DNA, 20 bp, Homo sapiens
  source 1..20: mol_type = genomic DNA
caaaattaaaggttgtagaa

SEQ ID NO: 161145 - DNA, 20 bp, Homo sapiens
  source 1..20: mol_type = genomic DNA
aaaattaaaggttgtagaag

SEQ ID NO: 161146 - DNA, 20 bp, Homo sapiens
  source 1..20: mol_type = genomic DNA
aaattaaaggttgtagaaga

SEQ ID NO: 161147 - DNA, 20 bp, Homo sapiens
  source 1..20: mol_type = genomic DNA
aattaaaggttgtagaagag

SEQ ID NO: 161148 - DNA, 20 bp, Homo sapiens
  source 1..20: mol_type = genomic DNA
attaaaggttgtagaagagt

SEQ ID NO: 161149 - DNA, 20 bp, Homo sapiens
  source 1..20: mol_type = genomic DNA
ttaaaggttgtagaagagtc

SEQ ID NO: 161150 - DNA, 20 bp, Homo sapiens
  source 1..20: mol_type = genomic DNA
taaaggttgtagaagagtca

SEQ ID NO: 161151 - DNA, 20 bp, Homo sapiens
  source 1..20: mol_type = genomic DNA
aaaggttgtagaagagtcac

SEQ ID NO: 161152 - DNA, 20 bp, Homo sapiens
  source 1..20: mol_type = genomic DNA
aaggttgtagaagagtcaca

SEQ ID NO: 161153 - DNA, 20 bp, Homo sapiens
  source 1..20: mol_type = genomic DNA
aggttgtagaagagtcacag

SEQ ID NO: 161154 - DNA, 20 bp, Homo sapiens
  source 1..20: mol_type = genomic DNA
ggttgtagaagagtcacagt

SEQ ID NO: 161155 - DNA, 20 bp, Homo sapiens
  source 1..20: mol_type = genomic DNA
gttgtagaagagtcacagta

SEQ ID NO: 161156 - DNA, 20 bp, Homo sapiens
  source 1..20: mol_type = genomic DNA
ttgtagaagagtcacagtat

SEQ ID NO: 161157 - DNA, 20 bp, Homo sapiens
  source 1..20: mol_type = genomic DNA
tgtagaagagtcacagtatc

SEQ ID NO: 161158 - DNA, 20 bp, Homo sapiens
  source 1..20: mol_type = genomic DNA
gtagaagagtcacagtatct

SEQ ID NO: 161159 - DNA, 20 bp, Homo sapiens
  source 1..20: mol_type = genomic DNA
tagaagagtcacagtatcta

SEQ ID NO: 161160 - DNA, 20 bp, Homo sapiens
  source 1..20: mol_type = genomic DNA
agaagagtcacagtatctat

SEQ ID NO: 161161 - DNA, 20 bp, Homo sapiens
  source 1..20: mol_type = genomic DNA
gaagagtcacagtatctatt

SEQ ID NO: 161162 - DNA, 20 bp, Homo sapiens
  source 1..20: mol_type = genomic DNA
aagagtcacagtatctattg

SEQ ID NO: 161163 - DNA, 20 bp, Homo sapiens
  source 1..20: mol_type = genomic DNA
agagtcacagtatctattgt

SEQ ID NO: 161164 - DNA, 20 bp, Homo sapiens
  source 1..20: mol_type = genomic DNA
gagtcacagtatctattgtc

SEQ ID NO: 161165 - DNA, 20 bp, Homo sapiens
  source 1..20: mol_type = genomic DNA
agtcacagtatctattgtca

SEQ ID NO: 161166 - DNA, 20 bp, Homo sapiens
  source 1..20: mol_type = genomic DNA
gtcacagtatctattgtcaa

SEQ ID NO: 161167 - DNA, 20 bp, Homo sapiens
  source 1..20: mol_type = genomic DNA
tcacagtatctattgtcaaa

SEQ ID NO: 161168 - DNA, 20 bp, Homo sapiens
  source 1..20: mol_type = genomic DNA
cacagtatctattgtcaaaa

SEQ ID NO: 161169 - DNA, 20 bp, Homo sapiens
  source 1..20: mol_type = genomic DNA
acagtatctattgtcaaaaa

SEQ ID NO: 161170 - DNA, 20 bp, Homo sapiens
  source 1..20: mol_type = genomic DNA
cagtatctattgtcaaaaag

SEQ ID NO: 161171 - DNA, 20 bp, Homo sapiens
  source 1..20: mol_type = genomic DNA
agtatctattgtcaaaaaga

SEQ ID NO: 161172 - DNA, 20 bp, Homo sapiens
  source 1..20: mol_type = genomic DNA
gtatctattgtcaaaaagaa

SEQ ID NO: 161173 - DNA, 20 bp, Homo sapiens
  source 1..20: mol_type = genomic DNA
tatctattgtcaaaaagaaa

SEQ ID NO: 161174 - DNA, 20 bp, Homo sapiens
  source 1..20: mol_type = genomic DNA
atctattgtcaaaaagaaaa

SEQ ID NO: 161175 - DNA, 20 bp, Homo sapiens
  source 1..20: mol_type = genomic DNA
tctattgtcaaaaagaaaag

SEQ ID NO: 161176 - DNA, 20 bp, Homo sapiens
  source 1..20: mol_type = genomic DNA
ctattgtcaaaaagaaaaga

SEQ ID NO: 161177 - DNA, 20 bp, Homo sapiens
  source 1..20: mol_type = genomic DNA
tattgtcaaaaagaaaagaa

SEQ ID NO: 161178 - DNA, 20 bp, Homo sapiens
  source 1..20: mol_type = genomic DNA
attgtcaaaaagaaaagaat

SEQ ID NO: 161179 - DNA, 20 bp, Homo sapiens
  source 1..20: mol_type = genomic DNA
ttgtcaaaaagaaaagaatt

SEQ ID NO: 161180 - DNA, 20 bp, Homo sapiens
  source 1..20: mol_type = genomic DNA
tgtcaaaaagaaaagaattt

SEQ ID NO: 161181 - DNA, 20 bp, Homo sapiens
  source 1..20: mol_type = genomic DNA
gtcaaaaagaaaagaattta

SEQ ID NO: 161182 - DNA, 20 bp, Homo sapiens
  source 1..20: mol_type = genomic DNA
tcaaaaagaaaagaatttaa

SEQ ID NO: 161183 - DNA, 20 bp, Homo sapiens
  source 1..20: mol_type = genomic DNA
caaaaagaaaagaatttaaa

SEQ ID NO: 161184 - DNA, 20 bp, Homo sapiens
  source 1..20: mol_type = genomic DNA
aaaaagaaaagaatttaaaa

SEQ ID NO: 161185 - DNA, 20 bp, Homo sapiens
  source 1..20: mol_type = genomic DNA
aaaagaaaagaatttaaaaa

SEQ ID NO: 161186 - DNA, 20 bp, Homo sapiens
  source 1..20: mol_type = genomic DNA
aaagaaaagaatttaaaaag

SEQ ID NO: 161187 - DNA, 20 bp, Homo sapiens
  source 1..20: mol_type = genomic DNA
aagaaaagaatttaaaaagg

SEQ ID NO: 161188 - DNA, 20 bp, Homo sapiens
  source 1..20: mol_type = genomic DNA
agaaaagaatttaaaaaggc

SEQ ID NO: 161189 - DNA, 20 bp, Homo sapiens
  source 1..20: mol_type = genomic DNA
gaaaagaatttaaaaaggca

SEQ ID NO: 161190 - DNA, 20 bp, Homo sapiens
  source 1..20: mol_type = genomic DNA
aaaagaatttaaaaaggcag

SEQ ID NO: 161191 - DNA, 20 bp, Homo sapiens
  source 1..20: mol_type = genomic DNA
aaagaatttaaaaaggcagc

SEQ ID NO: 161192 - DNA, 20 bp, Homo sapiens
  source 1..20: mol_type = genomic DNA
aagaatttaaaaaggcagca

SEQ ID NO: 161193 - DNA, 20 bp, Homo sapiens
  source 1..20: mol_type = genomic DNA
agaatttaaaaaggcagcaa

SEQ ID NO: 161194 - DNA, 20 bp, Homo sapiens
  source 1..20: mol_type = genomic DNA
gaatttaaaaaggcagcaat

SEQ ID NO: 161195 - DNA, 20 bp, Homo sapiens
  source 1..20: mol_type = genomic DNA
aatttaaaaaggcagcaatt

SEQ ID NO: 161196 - DNA, 20 bp, Homo sapiens
  source 1..20: mol_type = genomic DNA
atttaaaaaggcagcaattg

SEQ ID NO: 161197 - DNA, 20 bp, Homo sapiens
  source 1..20: mol_type = genomic DNA
tttaaaaaggcagcaattgc

SEQ ID NO: 161198 - DNA, 20 bp, Homo sapiens
  source 1..20: mol_type = genomic DNA
ttaaaaaggcagcaattgcc

SEQ ID NO: 161199 - DNA, 20 bp, Homo sapiens
  source 1..20: mol_type = genomic DNA
taaaaaggcagcaattgcca

SEQ ID NO: 161200 - DNA, 20 bp, Homo sapiens
  source 1..20: mol_type = genomic DNA
aaaaaggcagcaattgccag

SEQ ID NO: 161201 - DNA, 20 bp, Homo sapiens
  source 1..20: mol_type = genomic DNA
aaaaggcagcaattgccagg

SEQ ID NO: 161202 - DNA, 20 bp, Homo sapiens
  source 1..20: mol_type = genomic DNA
aaaggcagcaattgccagga

SEQ ID NO: 161203 - DNA, 20 bp, Homo sapiens
  source 1..20: mol_type = genomic DNA
aaggcagcaattgccaggat

SEQ ID NO: 161204 - DNA, 20 bp, Homo sapiens
  source 1..20: mol_type = genomic DNA
aggcagcaattgccaggata

SEQ ID NO: 161205 - DNA, 20 bp, Homo sapiens
  source 1..20: mol_type = genomic DNA
ggcagcaattgccaggatac

SEQ ID NO: 161206 - DNA, 20 bp, Homo sapiens
  source 1..20: mol_type = genomic DNA
gcagcaattgccaggatact

SEQ ID NO: 161207 - DNA, 20 bp, Homo sapiens
  source 1..20: mol_type = genomic DNA
cagcaattgccaggatactt

SEQ ID NO: 161208 - DNA, 20 bp, Homo sapiens
  source 1..20: mol_type = genomic DNA
agcaattgccaggatacttc

SEQ ID NO: 161209 - DNA, 20 bp, Homo sapiens
  source 1..20: mol_type = genomic DNA
gcaattgccaggatacttca

SEQ ID NO: 161210 - DNA, 20 bp, Homo sapiens
  source 1..20: mol_type = genomic DNA
caattgccaggatacttcat

SEQ ID NO: 161211 - DNA, 20 bp, Homo sapiens
  source 1..20: mol_type = genomic DNA
aattgccaggatacttcatt

SEQ ID NO: 161212 - DNA, 20 bp, Homo sapiens
  source 1..20: mol_type = genomic DNA
attgccaggatacttcattt

SEQ ID NO: 161213 - DNA, 20 bp, Homo sapiens
  source 1..20: mol_type = genomic DNA
ttgccaggatacttcatttg

SEQ ID NO: 161214 - DNA, 20 bp, Homo sapiens
  source 1..20: mol_type = genomic DNA
tgccaggatacttcatttga

SEQ ID NO: 161215 - DNA, 20 bp, Homo sapiens
  source 1..20: mol_type = genomic DNA
gccaggatacttcatttgag

SEQ ID NO: 161216 - DNA, 20 bp, Homo sapiens
  source 1..20: mol_type = genomic DNA
ccaggatacttcatttgagc

SEQ ID NO: 161217 - DNA, 20 bp, Homo sapiens
  source 1..20: mol_type = genomic DNA
caggatacttcatttgagca

SEQ ID NO: 161218 - DNA, 20 bp, Homo sapiens
  source 1..20: mol_type = genomic DNA
aggatacttcatttgagcaa

SEQ ID NO: 161219 - DNA, 20 bp, Homo sapiens
  source 1..20: mol_type = genomic DNA
ggatacttcatttgagcaat

SEQ ID NO: 161220 - DNA, 20 bp, Homo sapiens
  source 1..20: mol_type = genomic DNA
gatacttcatttgagcaatg

SEQ ID NO: 161221 - DNA, 20 bp, Homo sapiens
  source 1..20: mol_type = genomic DNA
atacttcatttgagcaatga

SEQ ID NO: 161222 - DNA, 20 bp, Homo sapiens
  source 1..20: mol_type = genomic DNA
tacttcatttgagcaatgat

SEQ ID NO: 161223 - DNA, 20 bp, Homo sapiens
  source 1..20: mol_type = genomic DNA
acttcatttgagcaatgata

SEQ ID NO: 161224 - DNA, 20 bp, Homo sapiens
  source 1..20: mol_type = genomic DNA
cttcatttgagcaatgatat

SEQ ID NO: 161225 - DNA, 20 bp, Homo sapiens
  source 1..20: mol_type = genomic DNA
ttcatttgagcaatgatatt

SEQ ID NO: 161226 - DNA, 20 bp, Homo sapiens
  source 1..20: mol_type = genomic DNA
tcatttgagcaatgatattt

SEQ ID NO: 161227 - DNA, 20 bp, Homo sapiens
  source 1..20: mol_type = genomic DNA
catttgagcaatgatatttt

SEQ ID NO: 161228 - DNA, 20 bp, Homo sapiens
  source 1..20: mol_type = genomic DNA
atttgagcaatgatattttc

SEQ ID NO: 161229 - DNA, 20 bp, Homo sapiens
  source 1..20: mol_type = genomic DNA
tttgagcaatgatattttcc

SEQ ID NO: 161230 - DNA, 20 bp, Homo sapiens
  source 1..20: mol_type = genomic DNA
ttgagcaatgatattttcca

SEQ ID NO: 161231 - DNA, 20 bp, Homo sapiens
  source 1..20: mol_type = genomic DNA
tgagcaatgatattttccag

SEQ ID NO: 161232 - DNA, 20 bp, Homo sapiens
  source 1..20: mol_type = genomic DNA
gagcaatgatattttccagt

SEQ ID NO: 161233 - DNA, 20 bp, Homo sapiens
  source 1..20: mol_type = genomic DNA
agcaatgatattttccagtg

SEQ ID NO: 161234 - DNA, 20 bp, Homo sapiens
  source 1..20: mol_type = genomic DNA
gcaatgatattttccagtgg

SEQ ID NO: 161235 - DNA, 20 bp, Homo sapiens
  source 1..20: mol_type = genomic DNA
caatgatattttccagtgga

SEQ ID NO: 161236 - DNA, 20 bp, Homo sapiens
  source 1..20: mol_type = genomic DNA
aatgatattttccagtggaa

SEQ ID NO: 161237 - DNA, 20 bp, Homo sapiens
  source 1..20: mol_type = genomic DNA
atgatattttccagtggaaa

SEQ ID NO: 161238 - DNA, 20 bp, Homo sapiens
  source 1..20: mol_type = genomic DNA
tgatattttccagtggaaag

SEQ ID NO: 161239 - DNA, 20 bp, Homo sapiens
  source 1..20: mol_type = genomic DNA
gatattttccagtggaaagt

SEQ ID NO: 161240 - DNA, 20 bp, Homo sapiens
  source 1..20: mol_type = genomic DNA
atattttccagtggaaagtc

SEQ ID NO: 161241 - DNA, 20 bp, Homo sapiens
  source 1..20: mol_type = genomic DNA
tattttccagtggaaagtca

SEQ ID NO: 161242 - DNA, 20 bp, Homo sapiens
  source 1..20: mol_type = genomic DNA
attttccagtggaaagtcac

SEQ ID NO: 161243 - DNA, 20 bp, Homo sapiens
  source 1..20: mol_type = genomic DNA
ttttccagtggaaagtcaca

SEQ ID NO: 161244 - DNA, 20 bp, Homo sapiens
  source 1..20: mol_type = genomic DNA
tttccagtggaaagtcacat

SEQ ID NO: 161245 - DNA, 20 bp, Homo sapiens
  source 1..20: mol_type = genomic DNA
ttccagtggaaagtcacatc

SEQ ID NO: 161246 - DNA, 20 bp, Homo sapiens
  source 1..20: mol_type = genomic DNA
tccagtggaaagtcacatct

SEQ ID NO: 161247 - DNA, 20 bp, Homo sapiens
  source 1..20: mol_type = genomic DNA
ccagtggaaagtcacatctt

SEQ ID NO: 161248 - DNA, 20 bp, Homo sapiens
  source 1..20: mol_type = genomic DNA
cagtggaaagtcacatctta

SEQ ID NO: 161249 - DNA, 20 bp, Homo sapiens
  source 1..20: mol_type = genomic DNA
agtggaaagtcacatcttaa

SEQ ID NO: 161250 - DNA, 20 bp, Homo sapiens
  source 1..20: mol_type = genomic DNA
gtggaaagtcacatcttaag

SEQ ID NO: 161251 - DNA, 20 bp, Homo sapiens
  source 1..20: mol_type = genomic DNA
tggaaagtcacatcttaagg

SEQ ID NO: 161252 - DNA, 20 bp, Homo sapiens
  source 1..20: mol_type = genomic DNA
ggaaagtcacatcttaaggg

SEQ ID NO: 161253 - DNA, 20 bp, Homo sapiens
  source 1..20: mol_type = genomic DNA
gaaagtcacatcttaagggt

SEQ ID NO: 161254 - DNA, 20 bp, Homo sapiens
  source 1..20: mol_type = genomic DNA
aaagtcacatcttaagggtt

SEQ ID NO: 161255 - DNA, 20 bp, Homo sapiens
  source 1..20: mol_type = genomic DNA
aagtcacatcttaagggtta

SEQ ID NO: 161256 - DNA, 20 bp, Homo sapiens
  source 1..20: mol_type = genomic DNA
agtcacatcttaagggttaa

SEQ ID NO: 161257 - DNA, 20 bp, Homo sapiens
  source 1..20: mol_type = genomic DNA
gtcacatcttaagggttaat

SEQ ID NO: 161258 - DNA, 20 bp, Homo sapiens
  source 1..20: mol_type = genomic DNA
tcacatcttaagggttaatg

SEQ ID NO: 161259 - DNA, 20 bp, Homo sapiens
  source 1..20: mol_type = genomic DNA
cacatcttaagggttaatgc

SEQ ID NO: 161260 - DNA, 20 bp, Homo sapiens
  source 1..20: mol_type = genomic DNA
acatcttaagggttaatgcc

SEQ ID NO: 161261 - DNA, 20 bp, Homo sapiens
  source 1..20: mol_type = genomic DNA
catcttaagggttaatgccc

SEQ ID NO: 161262 - DNA, 20 bp, Homo sapiens
  source 1..20: mol_type = genomic DNA
atcttaagggttaatgcccc

SEQ ID NO: 161263 - DNA, 20 bp, Homo sapiens
  source 1..20: mol_type = genomic DNA
tcttaagggttaatgcccct

SEQ ID NO: 161264 - DNA, 20 bp, Homo sapiens
  source 1..20: mol_type = genomic DNA
cttaagggttaatgcccctt

SEQ ID NO: 161265 - DNA, 20 bp, Homo sapiens
  source 1..20: mol_type = genomic DNA
ttaagggttaatgcccctta

SEQ ID NO: 161266 - DNA, 20 bp, Homo sapiens
  source 1..20: mol_type = genomic DNA
taagggttaatgccccttaa

SEQ ID NO: 161267 - DNA, 20 bp, Homo sapiens
  source 1..20: mol_type = genomic DNA
aagggttaatgccccttaac

SEQ ID NO: 161268 - DNA, 20 bp, Homo sapiens
  source 1..20: mol_type = genomic DNA
agggttaatgccccttaact

SEQ ID NO: 161269 - DNA, 20 bp, Homo sapiens
  source 1..20: mol_type = genomic DNA
gggttaatgccccttaactg

SEQ ID NO: 161270 - DNA, 20 bp, Homo sapiens
  source 1..20: mol_type = genomic DNA
ggttaatgccccttaactgt

SEQ ID NO: 161271 - DNA, 20 bp, Homo sapiens
  source 1..20: mol_type = genomic DNA
gttaatgccccttaactgtt

SEQ ID NO: 161272 - DNA, 20 bp, Homo sapiens
  source 1..20: mol_type = genomic DNA
ttaatgccccttaactgttg

SEQ ID NO: 161273 - DNA, 20 bp, Homo sapiens
  source 1..20: mol_type = genomic DNA
taatgccccttaactgttgg

SEQ ID NO: 161274 - DNA, 20 bp, Homo sapiens
  source 1..20: mol_type = genomic DNA
aatgccccttaactgttggc

SEQ ID NO: 161275 - DNA, 20 bp, Homo sapiens
  source 1..20: mol_type = genomic DNA
atgccccttaactgttggcc

SEQ ID NO: 161276 - DNA, 20 bp, Homo sapiens
  source 1..20: mol_type = genomic DNA
tgccccttaactgttggccg

SEQ ID NO: 161277 - DNA, 20 bp, Homo sapiens
  source 1..20: mol_type = genomic DNA
gccccttaactgttggccgt

SEQ ID NO: 161278 - DNA, 20 bp, Homo sapiens
  source 1..20: mol_type = genomic DNA
ccccttaactgttggccgta

SEQ ID NO: 161279 - DNA, 20 bp, Homo sapiens
  source 1..20: mol_type = genomic DNA
cccttaactgttggccgtat

SEQ ID NO: 161280 - DNA, 20 bp, Homo sapiens
  source 1..20: mol_type = genomic DNA
ccttaactgttggccgtatt

SEQ ID NO: 161281 - DNA, 20 bp, Homo sapiens
  source 1..20: mol_type = genomic DNA
cttaactgttggccgtattt

SEQ ID NO: 161282 - DNA, 20 bp, Homo sapiens
  source 1..20: mol_type = genomic DNA
ttaactgttggccgtatttg

SEQ ID NO: 161283 - DNA, 20 bp, Homo sapiens
  source 1..20: mol_type = genomic DNA
taactgttggccgtatttga

SEQ ID NO: 161284 - DNA, 20 bp, Homo sapiens
  source 1..20: mol_type = genomic DNA
aactgttggccgtatttgaa

SEQ ID NO: 161285 - DNA, 20 bp, Homo sapiens
  source 1..20: mol_type = genomic DNA
actgttggccgtatttgaaa

SEQ ID NO: 161286 - DNA, 20 bp, Homo sapiens
  source 1..20: mol_type = genomic DNA
ctgttggccgtatttgaaaa

SEQ ID NO: 161287 - DNA, 20 bp, Homo sapiens
  source 1..20: mol_type = genomic DNA
tgttggccgtatttgaaaac

SEQ ID NO: 161288 - DNA, 20 bp, Homo sapiens
  source 1..20: mol_type = genomic DNA
gttggccgtatttgaaaaca

SEQ ID NO: 161289 - DNA, 20 bp, Homo sapiens
  source 1..20: mol_type = genomic DNA
ttggccgtatttgaaaacaa

SEQ ID NO: 161290 - DNA, 20 bp, Homo sapiens
  source 1..20: mol_type = genomic DNA
tggccgtatttgaaaacaaa

SEQ ID NO: 161291 - DNA, 20 bp, Homo sapiens
  source 1..20: mol_type = genomic DNA
ggccgtatttgaaaacaaac

SEQ ID NO: 161292 - DNA, 20 bp, Homo sapiens
  source 1..20: mol_type = genomic DNA
gccgtatttgaaaacaaacc

SEQ ID NO: 161293 - DNA, 20 bp, Homo sapiens
  source 1..20: mol_type = genomic DNA
ccgtatttgaaaacaaacca

SEQ ID NO: 161294 - DNA, 20 bp, Homo sapiens
  source 1..20: mol_type = genomic DNA
cgtatttgaaaacaaaccaa

SEQ ID NO: 161295 - DNA, 20 bp, Homo sapiens
  source 1..20: mol_type = genomic DNA
gtatttgaaaacaaaccaag

SEQ ID NO: 161296 - DNA, 20 bp, Homo sapiens
  source 1..20: mol_type = genomic DNA
tatttgaaaacaaaccaagc

SEQ ID NO: 161297 - DNA, 20 bp, Homo sapiens
  source 1..20: mol_type = genomic DNA
atttgaaaacaaaccaagct

SEQ ID NO: 161298 - DNA, 20 bp, Homo sapiens
  source 1..20: mol_type = genomic DNA
tttgaaaacaaaccaagcta

SEQ ID NO: 161299 - DNA, 20 bp, Homo sapiens
  source 1..20: mol_type = genomic DNA
ttgaaaacaaaccaagctaa

SEQ ID NO: 161300 - DNA, 20 bp, Homo sapiens
  source 1..20: mol_type = genomic DNA
tgaaaacaaaccaagctaaa

SEQ ID NO: 161301 - DNA, 20 bp, Homo sapiens
  source 1..20: mol_type = genomic DNA
gaaaacaaaccaagctaaaa

SEQ ID NO: 161302 - DNA, 20 bp, Homo sapiens
  source 1..20: mol_type = genomic DNA
aaaacaaaccaagctaaaaa

SEQ ID NO: 161303 - DNA, 20 bp, Homo sapiens
  source 1..20: mol_type = genomic DNA
aaacaaaccaagctaaaaac

SEQ ID NO: 161304 - DNA, 20 bp, Homo sapiens
  source 1..20: mol_type = genomic DNA
aacaaaccaagctaaaaaca

SEQ ID NO: 161305 - DNA, 20 bp, Homo sapiens
  source 1..20: mol_type = genomic DNA
acaaaccaagctaaaaacaa

SEQ ID NO: 161306 - DNA, 20 bp, Homo sapiens
  source 1..20: mol_type = genomic DNA
caaaccaagctaaaaacaag

SEQ ID NO: 161307 - DNA, 20 bp, Homo sapiens
  source 1..20: mol_type = genomic DNA
aaaccaagctaaaaacaaga

SEQ ID NO: 161308 - DNA, 20 bp, Homo sapiens
  source 1..20: mol_type = genomic DNA
aaccaagctaaaaacaagag

SEQ ID NO: 161309 - DNA, 20 bp, Homo sapiens
  source 1..20: mol_type = genomic DNA
accaagctaaaaacaagaga

SEQ ID NO: 161310 - DNA, 20 bp, Homo sapiens
  source 1..20: mol_type = genomic DNA
ccaagctaaaaacaagagac

SEQ ID NO: 161311 - DNA, 20 bp, Homo sapiens
  source 1..20: mol_type = genomic DNA
caagctaaaaacaagagaca

SEQ ID NO: 161312 - DNA, 20 bp, Homo sapiens
  source 1..20: mol_type = genomic DNA
aagctaaaaacaagagacac

SEQ ID NO: 161313 - DNA, 20 bp, Homo sapiens
  source 1..20: mol_type = genomic DNA
agctaaaaacaagagacact

SEQ ID NO: 161314 - DNA, 20 bp, Homo sapiens
  source 1..20: mol_type = genomic DNA
gctaaaaacaagagacactg

SEQ ID NO: 161315 - DNA, 20 bp, Homo sapiens
  source 1..20: mol_type = genomic DNA
ctaaaaacaagagacactga

SEQ ID NO: 161316 - DNA, 20 bp, Homo sapiens
  source 1..20: mol_type = genomic DNA
taaaaacaagagacactgac

SEQ ID NO: 161317 - DNA, 20 bp, Homo sapiens
  source 1..20: mol_type = genomic DNA
aaaaacaagagacactgaca

SEQ ID NO: 161318 - DNA, 20 bp, Homo sapiens
  source 1..20: mol_type = genomic DNA
aaaacaagagacactgacat

SEQ ID NO: 161319 - DNA, 20 bp, Homo sapiens
  source 1..20: mol_type = genomic DNA
aaacaagagacactgacatg

SEQ ID NO: 161320 - DNA, 20 bp, Homo sapiens
  source 1..20: mol_type = genomic DNA
aacaagagacactgacatgt

SEQ ID NO: 161321 - DNA, 20 bp, Homo sapiens
  source 1..20: mol_type = genomic DNA
acaagagacactgacatgtt

SEQ ID NO: 161322 - DNA, 20 bp, Homo sapiens
  source 1..20: mol_type = genomic DNA
caagagacactgacatgttg

SEQ ID NO: 161323 - DNA, 20 bp, Homo sapiens
  source 1..20: mol_type = genomic DNA
aagagacactgacatgttgt

SEQ ID NO: 161324 - DNA, 20 bp, Homo sapiens
  source 1..20: mol_type = genomic DNA
agagacactgacatgttgta

SEQ ID NO: 161325 - DNA, 20 bp, Homo sapiens
  source 1..20: mol_type = genomic DNA
gagacactgacatgttgtat

SEQ ID NO: 161326 - DNA, 20 bp, Homo sapiens
  source 1..20: mol_type = genomic DNA
agacactgacatgttgtatg

SEQ ID NO: 161327 - DNA, 20 bp, Homo sapiens
  source 1..20: mol_type = genomic DNA
gacactgacatgttgtatga

SEQ ID NO: 161328 - DNA, 20 bp, Homo sapiens
  source 1..20: mol_type = genomic DNA
acactgacatgttgtatgac

SEQ ID NO: 161329 - DNA, 20 bp, Homo sapiens
  source 1..20: mol_type = genomic DNA
cactgacatgttgtatgacg

SEQ ID NO: 161330 - DNA, 20 bp, Homo sapiens
  source 1..20: mol_type = genomic DNA
actgacatgttgtatgacgg

SEQ ID NO: 161331 - DNA, 20 bp, Homo sapiens
  source 1..20: mol_type = genomic DNA
ctgacatgttgtatgacggt

SEQ ID NO: 161332 - DNA, 20 bp, Homo sapiens
  source 1..20: mol_type = genomic DNA
tgacatgttgtatgacggtg

SEQ ID NO: 161333 - DNA, 20 bp, Homo sapiens
  source 1..20: mol_type = genomic DNA
gacatgttgtatgacggtgt

SEQ ID NO: 161334 - DNA, 20 bp, Homo sapiens
  source 1..20: mol_type = genomic DNA
acatgttgtatgacggtgtg

SEQ ID NO: 161335 - DNA, 20 bp, Homo sapiens
  source 1..20: mol_type = genomic DNA
catgttgtatgacggtgtgg

SEQ ID NO: 161336 - DNA, 20 bp, Homo sapiens
  source 1..20: mol_type = genomic DNA
atgttgtatgacggtgtggt

SEQ ID NO: 161337 - DNA, 20 bp, Homo sapiens
  source 1..20: mol_type = genomic DNA
tgttgtatgacggtgtggtg

SEQ ID NO: 161338 - DNA, 20 bp, Homo sapiens
  source 1..20: mol_type = genomic DNA
gttgtatgacggtgtggtgt

SEQ ID NO: 161339 - DNA, 20 bp, Homo sapiens
  source 1..20: mol_type = genomic DNA
ttgtatgacggtgtggtgtg

SEQ ID NO: 161340 - DNA, 20 bp, Homo sapiens
  source 1..20: mol_type = genomic DNA
tgtatgacggtgtggtgtgg

SEQ ID NO: 161341 - DNA, 20 bp, Homo sapiens
  source 1..20: mol_type = genomic DNA
gtatgacggtgtggtgtgga

SEQ ID NO: 161342 - DNA, 20 bp, Homo sapiens
  source 1..20: mol_type = genomic DNA
tatgacggtgtggtgtggat

SEQ ID NO: 161343 - DNA, 20 bp, Homo sapiens
  source 1..20: mol_type = genomic DNA
atgacggtgtggtgtggatg

SEQ ID NO: 161344 - DNA, 20 bp, Homo sapiens
  source 1..20: mol_type = genomic DNA
tgacggtgtggtgtggatgt

SEQ ID NO: 161345 - DNA, 20 bp, Homo sapiens
  source 1..20: mol_type = genomic DNA
gacggtgtggtgtggatgtt

SEQ ID NO: 161346 - DNA, 20 bp, Homo sapiens
  source 1..20: mol_type = genomic DNA
acggtgtggtgtggatgttg

SEQ ID NO: 161347 - DNA, 20 bp, Homo sapiens
  source 1..20: mol_type = genomic DNA
cggtgtggtgtggatgttgt

SEQ ID NO: 161348 - DNA, 20 bp, Homo sapiens
  source 1..20: mol_type = genomic DNA
ggtgtggtgtggatgttgtg

SEQ ID NO: 161349 - DNA, 20 bp, Homo sapiens
  source 1..20: mol_type = genomic DNA
gtgtggtgtggatgttgtgt

SEQ ID NO: 161350 - DNA, 20 bp, Homo sapiens
  source 1..20: mol_type = genomic DNA
tgtggtgtggatgttgtgtt

SEQ ID NO: 161351 - DNA, 20 bp, Homo sapiens
  source 1..20: mol_type = genomic DNA
gtggtgtggatgttgtgttt

SEQ ID NO: 161352 - DNA, 20 bp, Homo sapiens
  source 1..20: mol_type = genomic DNA
tggtgtggatgttgtgttta

SEQ ID NO: 161353 - DNA, 20 bp, Homo sapiens
  source 1..20: mol_type = genomic DNA
ggtgtggatgttgtgtttat

SEQ ID NO: 161354 - DNA, 20 bp, Homo sapiens
  source 1..20: mol_type = genomic DNA
gtgtggatgttgtgtttatt

SEQ ID NO: 161355 - DNA, 20 bp, Homo sapiens
  source 1..20: mol_type = genomic DNA
tgtggatgttgtgtttattt

SEQ ID NO: 161356 - DNA, 20 bp, Homo sapiens
  source 1..20: mol_type = genomic DNA
gtggatgttgtgtttatttt

SEQ ID NO: 161357 - DNA, 20 bp, Homo sapiens
  source 1..20: mol_type = genomic DNA
tggatgttgtgtttatttta

SEQ ID NO: 161358 - DNA, 20 bp, Homo sapiens
  source 1..20: mol_type = genomic DNA
ggatgttgtgtttattttag

SEQ ID NO: 161359 - DNA, 20 bp, Homo sapiens
  source 1..20: mol_type = genomic DNA
gatgttgtgtttattttagt

SEQ ID NO: 161360 - DNA, 20 bp, Homo sapiens
  source 1..20: mol_type = genomic DNA
atgttgtgtttattttagtc

SEQ ID NO: 161361 - DNA, 20 bp, Homo sapiens
  source 1..20: mol_type = genomic DNA
tgttgtgtttattttagtcc

SEQ ID NO: 161362 - DNA, 20 bp, Homo sapiens
  source 1..20: mol_type = genomic DNA
gttgtgtttattttagtcct

SEQ ID NO: 161363 - DNA, 20 bp, Homo sapiens
  source 1..20: mol_type = genomic DNA
ttgtgtttattttagtcctg

SEQ ID NO: 161364 - DNA, 20 bp, Homo sapiens
  source 1..20: mol_type = genomic DNA
tgtgtttattttagtcctga

SEQ ID NO: 161365 - DNA, 20 bp, Homo sapiens
  source 1..20: mol_type = genomic DNA
gtgtttattttagtcctgag

SEQ ID NO: 161366 - DNA, 20 bp, Homo sapiens
  source 1..20: mol_type = genomic DNA
tgtttattttagtcctgaga

SEQ ID NO: 161367 - DNA, 20 bp, Homo sapiens
  source 1..20: mol_type = genomic DNA
gtttattttagtcctgagat

SEQ ID NO: 161368 - DNA, 20 bp, Homo sapiens
  source 1..20: mol_type = genomic DNA
tttattttagtcctgagatc

SEQ ID NO: 161369 - DNA, 20 bp, Homo sapiens
  source 1..20: mol_type = genomic DNA
ttattttagtcctgagatct

SEQ ID NO: 161370 - DNA, 20 bp, Homo sapiens
  source 1..20: mol_type = genomic DNA
tattttagtcctgagatcta

SEQ ID NO: 161371 - DNA, 20 bp, Homo sapiens
  source 1..20: mol_type = genomic DNA
attttagtcctgagatctag

SEQ ID NO: 161372 - DNA, 20 bp, Homo sapiens
  source 1..20: mol_type = genomic DNA
ttttagtcctgagatctagt

SEQ ID NO: 161373 - DNA, 20 bp, Homo sapiens
  source 1..20: mol_type = genomic DNA
tttagtcctgagatctagtt

SEQ ID NO: 161374 - DNA, 20 bp, Homo sapiens
  source 1..20: mol_type = genomic DNA
ttagtcctgagatctagttg

SEQ ID NO: 161375 - DNA, 20 bp, Homo sapiens
  source 1..20: mol_type = genomic DNA
tagtcctgagatctagttgt

SEQ ID NO: 161376 - DNA, 20 bp, Homo sapiens
  source 1..20: mol_type = genomic DNA
agtcctgagatctagttgta

SEQ ID NO: 161377 - DNA, 20 bp, Homo sapiens
  source 1..20: mol_type = genomic DNA
gtcctgagatctagttgtaa

SEQ ID NO: 161378 - DNA, 20 bp, Homo sapiens
  source 1..20: mol_type = genomic DNA
tcctgagatctagttgtaac

SEQ ID NO: 161379 - DNA, 20 bp, Homo sapiens
  source 1..20: mol_type = genomic DNA
cctgagatctagttgtaact

SEQ ID NO: 161380 - DNA, 20 bp, Homo sapiens
  source 1..20: mol_type = genomic DNA
ctgagatctagttgtaactt

SEQ ID NO: 161381 - DNA, 20 bp, Homo sapiens
  source 1..20: mol_type = genomic DNA
tgagatctagttgtaacttc

SEQ ID NO: 161382 - DNA, 20 bp, Homo sapiens
  source 1..20: mol_type = genomic DNA
gagatctagttgtaacttcc

SEQ ID NO: 161383 - DNA, 20 bp, Homo sapiens
  source 1..20: mol_type = genomic DNA
agatctagttgtaacttcct

SEQ ID NO: 161384 - DNA, 20 bp, Homo sapiens
  source 1..20: mol_type = genomic DNA
gatctagttgtaacttcctt

SEQ ID NO: 161385 - DNA, 20 bp, Homo sapiens
  source 1..20: mol_type = genomic DNA
atctagttgtaacttccttg

SEQ ID NO: 161386 - DNA, 20 bp, Homo sapiens
  source 1..20: mol_type = genomic DNA
tctagttgtaacttccttga

SEQ ID NO: 161387 - DNA, 20 bp, Homo sapiens
  source 1..20: mol_type = genomic DNA
ctagttgtaacttccttgat

SEQ ID NO: 161388 - DNA, 20 bp, Homo sapiens
  source 1..20: mol_type = genomic DNA
tagttgtaacttccttgatt

SEQ ID NO: 161389 - DNA, 20 bp, Homo sapiens
  source 1..20: mol_type = genomic DNA
agttgtaacttccttgattt

SEQ ID NO: 161390 - DNA, 20 bp, Homo sapiens
  source 1..20: mol_type = genomic DNA
gttgtaacttccttgatttc

SEQ ID NO: 161391 - DNA, 20 bp, Homo sapiens
  source 1..20: mol_type = genomic DNA
ttgtaacttccttgatttct

SEQ ID NO: 161392 - DNA, 20 bp, Homo sapiens
  source 1..20: mol_type = genomic DNA
tgtaacttccttgatttctg

SEQ ID NO: 161393 - DNA, 20 bp, Homo sapiens
  source 1..20: mol_type = genomic DNA
gtaacttccttgatttctgt

SEQ ID NO: 161394 - DNA, 20 bp, Homo sapiens
  source 1..20: mol_type = genomic DNA
taacttccttgatttctgta

SEQ ID NO: 161395 - DNA, 20 bp, Homo sapiens
  source 1..20: mol_type = genomic DNA
aacttccttgatttctgtat

SEQ ID NO: 161396 - DNA, 20 bp, Homo sapiens
  source 1..20: mol_type = genomic DNA
acttccttgatttctgtatg

SEQ ID NO: 161397 - DNA, 20 bp, Homo sapiens
  source 1..20: mol_type = genomic DNA
cttccttgatttctgtatgt

SEQ ID NO: 161398 - DNA, 20 bp, Homo sapiens
  source 1..20: mol_type = genomic DNA
ttccttgatttctgtatgta

SEQ ID NO: 161399 - DNA, 20 bp, Homo sapiens
  source 1..20: mol_type = genomic DNA
tccttgatttctgtatgtag

SEQ ID NO: 161400 - DNA, 20 bp, Homo sapiens
  source 1..20: mol_type = genomic DNA
ccttgatttctgtatgtagc

SEQ ID NO: 161401 - DNA, 20 bp, Homo sapiens
  source 1..20: mol_type = genomic DNA
cttgatttctgtatgtagcc

SEQ ID NO: 161402 - DNA, 20 bp, Homo sapiens
  source 1..20: mol_type = genomic DNA
ttgatttctgtatgtagcca

SEQ ID NO: 161403 - DNA, 20 bp, Homo sapiens
  source 1..20: mol_type = genomic DNA
tgatttctgtatgtagccac

SEQ ID NO: 161404 - DNA, 20 bp, Homo sapiens
  source 1..20: mol_type = genomic DNA
gatttctgtatgtagccacg

SEQ ID NO: 161405 - DNA, 20 bp, Homo sapiens
  source 1..20: mol_type = genomic DNA
atttctgtatgtagccacgg

SEQ ID NO: 161406 - DNA, 20 bp, Homo sapiens
  source 1..20: mol_type = genomic DNA
tttctgtatgtagccacgga

SEQ ID NO: 161407 - DNA, 20 bp, Homo sapiens
  source 1..20: mol_type = genomic DNA
ttctgtatgtagccacggag

SEQ ID NO: 161408 - DNA, 20 bp, Homo sapiens
  source 1..20: mol_type = genomic DNA
tctgtatgtagccacggagc

SEQ ID NO: 161409 - DNA, 20 bp, Homo sapiens
  source 1..20: mol_type = genomic DNA
ctgtatgtagccacggagca

SEQ ID NO: 161410 - DNA, 20 bp, Homo sapiens
  source 1..20: mol_type = genomic DNA
tgtatgtagccacggagcac

SEQ ID NO: 161411 - DNA, 20 bp, Homo sapiens
  source 1..20: mol_type = genomic DNA
gtatgtagccacggagcacc

SEQ ID NO: 161412 - DNA, 20 bp, Homo sapiens
  source 1..20: mol_type = genomic DNA
tatgtagccacggagcacca

SEQ ID NO: 161413 - DNA, 20 bp, Homo sapiens
  source 1..20: mol_type = genomic DNA
atgtagccacggagcaccat

SEQ ID NO: 161414 - DNA, 20 bp, Homo sapiens
  source 1..20: mol_type = genomic DNA
tgtagccacggagcaccatt

SEQ ID NO: 161415 - DNA, 20 bp, Homo sapiens
  source 1..20: mol_type = genomic DNA
gtagccacggagcaccatta

SEQ ID NO: 161416 - DNA, 20 bp, Homo sapiens
  source 1..20: mol_type = genomic DNA
tagccacggagcaccattac

SEQ ID NO: 161417 - DNA, 20 bp, Homo sapiens
  source 1..20: mol_type = genomic DNA
agccacggagcaccattacc

SEQ ID NO: 161418 - DNA, 20 bp, Homo sapiens
  source 1..20: mol_type = genomic DNA
gccacggagcaccattacct

SEQ ID NO: 161419 - DNA, 20 bp, Homo sapiens
  source 1..20: mol_type = genomic DNA
ccacggagcaccattacctg

SEQ ID NO: 161420 - DNA, 20 bp, Homo sapiens
  source 1..20: mol_type = genomic DNA
cacggagcaccattacctgt

SEQ ID NO: 161421 - DNA, 20 bp, Homo sapiens
  source 1..20: mol_type = genomic DNA
acggagcaccattacctgtc

SEQ ID NO: 161422 - DNA, 20 bp, Homo sapiens
  source 1..20: mol_type = genomic DNA
cggagcaccattacctgtca

SEQ ID NO: 161423 - DNA, 20 bp, Homo sapiens
  source 1..20: mol_type = genomic DNA
ggagcaccattacctgtcac

SEQ ID NO: 161424 - DNA, 20 bp, Homo sapiens
  source 1..20: mol_type = genomic DNA
gagcaccattacctgtcacc

SEQ ID NO: 161425 - DNA, 20 bp, Homo sapiens
  source 1..20: mol_type = genomic DNA
agcaccattacctgtcacca

SEQ ID NO: 161426 - DNA, 20 bp, Homo sapiens
  source 1..20: mol_type = genomic DNA
gcaccattacctgtcaccat

SEQ ID NO: 161427 - DNA, 20 bp, Homo sapiens
  source 1..20: mol_type = genomic DNA
caccattacctgtcaccatt

SEQ ID NO: 161428 - DNA, 20 bp, Homo sapiens
  source 1..20: mol_type = genomic DNA
accattacctgtcaccatta

SEQ ID NO: 161429 - DNA, 20 bp, Homo sapiens
  source 1..20: mol_type = genomic DNA
ccattacctgtcaccattac

SEQ ID NO: 161430 - DNA, 20 bp, Homo sapiens
  source 1..20: mol_type = genomic DNA
cattacctgtcaccattacc

SEQ ID NO: 161431 - DNA, 20 bp, Homo sapiens
  source 1..20: mol_type = genomic DNA
attacctgtcaccattacct

SEQ ID NO: 161432 - DNA, 20 bp, Homo sapiens
  source 1..20: mol_type = genomic DNA
ttacctgtcaccattacctg

SEQ ID NO: 161433 - DNA, 20 bp, Homo sapiens
  source 1..20: mol_type = genomic DNA
tacctgtcaccattacctga

SEQ ID NO: 161434 - DNA, 20 bp, Homo sapiens
  source 1..20: mol_type = genomic DNA
acctgtcaccattacctgaa

SEQ ID NO: 161435 - DNA, 20 bp, Homo sapiens
  source 1..20: mol_type = genomic DNA
cctgtcaccattacctgaat

SEQ ID NO: 161436 - DNA, 20 bp, Homo sapiens
  source 1..20: mol_type = genomic DNA
ctgtcaccattacctgaatg

SEQ ID NO: 161437 - DNA, 20 bp, Homo sapiens
  source 1..20: mol_type = genomic DNA
tgtcaccattacctgaatgg

SEQ ID NO: 161438 - DNA, 20 bp, Homo sapiens
  source 1..20: mol_type = genomic DNA
gtcaccattacctgaatggc

SEQ ID NO: 161439 - DNA, 20 bp, Homo sapiens
  source 1..20: mol_type = genomic DNA
tcaccattacctgaatggct

SEQ ID NO: 161440 - DNA, 20 bp, Homo sapiens
  source 1..20: mol_type = genomic DNA
caccattacctgaatggcta

SEQ ID NO: 161441 - DNA, 20 bp, Homo sapiens
  source 1..20: mol_type = genomic DNA
accattacctgaatggctat

SEQ ID NO: 161442 - DNA, 20 bp, Homo sapiens
  source 1..20: mol_type = genomic DNA
ccattacctgaatggctata

SEQ ID NO: 161443 - DNA, 20 bp, Homo sapiens
  source 1..20: mol_type = genomic DNA
cattacctgaatggctatac

SEQ ID NO: 161444 - DNA, 20 bp, Homo sapiens
  source 1..20: mol_type = genomic DNA
attacctgaatggctatact

SEQ ID NO: 161445 - DNA, 20 bp, Homo sapiens
  source 1..20: mol_type = genomic DNA
ttacctgaatggctatactg

SEQ ID NO: 161446 - DNA, 20 bp, Homo sapiens
  source 1..20: mol_type = genomic DNA
tacctgaatggctatactgc

SEQ ID NO: 161447 - DNA, 20 bp, Homo sapiens
  source 1..20: mol_type = genomic DNA
acctgaatggctatactgct

SEQ ID NO: 161448 - DNA, 20 bp, Homo sapiens
  source 1..20: mol_type = genomic DNA
cctgaatggctatactgctt

SEQ ID NO: 161449 - DNA, 20 bp, Homo sapiens
  source 1..20: mol_type = genomic DNA
ctgaatggctatactgcttg

SEQ ID NO: 161450 - DNA, 20 bp, Homo sapiens
  source 1..20: mol_type = genomic DNA
tgaatggctatactgcttgc

SEQ ID NO: 161451 - DNA, 20 bp, Homo sapiens
  source 1..20: mol_type = genomic DNA
gaatggctatactgcttgct

SEQ ID NO: 161452 - DNA, 20 bp, Homo sapiens
  source 1..20: mol_type = genomic DNA
aatggctatactgcttgctt

SEQ ID NO: 161453 - DNA, 20 bp, Homo sapiens
  source 1..20: mol_type = genomic DNA
atggctatactgcttgcttt

SEQ ID NO: 161454 - DNA, 20 bp, Homo sapiens
  source 1..20: mol_type = genomic DNA
tggctatactgcttgctttc

SEQ ID NO: 161455 - DNA, 20 bp, Homo sapiens
  source 1..20: mol_type = genomic DNA
ggctatactgcttgctttca

SEQ ID NO: 161456 - DNA, 20 bp, Homo sapiens
  source 1..20: mol_type = genomic DNA
gctatactgcttgctttcat

SEQ ID NO: 161457 - DNA, 20 bp, Homo sapiens
  source 1..20: mol_type = genomic DNA
ctatactgcttgctttcatt

SEQ ID NO: 161458 - DNA, 20 bp, Homo sapiens
  source 1..20: mol_type = genomic DNA
tatactgcttgctttcattt

SEQ ID NO: 161459 - DNA, 20 bp, Homo sapiens
  source 1..20: mol_type = genomic DNA
atactgcttgctttcatttt

SEQ ID NO: 161460 - DNA, 20 bp, Homo sapiens
  source 1..20: mol_type = genomic DNA
tactgcttgctttcattttg

SEQ ID NO: 161461 - DNA, 20 bp, Homo sapiens
  source 1..20: mol_type = genomic DNA
actgcttgctttcattttgg

SEQ ID NO: 161462 - DNA, 20 bp, Homo sapiens
  source 1..20: mol_type = genomic DNA
ctgcttgctttcattttggt

SEQ ID NO: 161463 - DNA, 20 bp, Homo sapiens
  source 1..20: mol_type = genomic DNA
tgcttgctttcattttggta

SEQ ID NO: 161464 - DNA, 20 bp, Homo sapiens
  source 1..20: mol_type = genomic DNA
gcttgctttcattttggtag

SEQ ID NO: 161465 - DNA, 20 bp, Homo sapiens
  source 1..20: mol_type = genomic DNA
cttgctttcattttggtaga

SEQ ID NO: 161466 - DNA, 20 bp, Homo sapiens
  source 1..20: mol_type = genomic DNA
ttgctttcattttggtagag

SEQ ID NO: 161467 - DNA, 20 bp, Homo sapiens
  source 1..20: mol_type = genomic DNA
tgctttcattttggtagagt

SEQ ID NO: 161468 - DNA, 20 bp, Homo sapiens
  source 1..20: mol_type = genomic DNA
gctttcattttggtagagtg

SEQ ID NO: 161469 - DNA, 20 bp, Homo sapiens
  source 1..20: mol_type = genomic DNA
ctttcattttggtagagtgg

SEQ ID NO: 161470 - DNA, 20 bp, Homo sapiens
  source 1..20: mol_type = genomic DNA
tttcattttggtagagtgga

SEQ ID NO: 161471 - DNA, 20 bp, Homo sapiens
  source 1..20: mol_type = genomic DNA
ttcattttggtagagtggaa

SEQ ID NO: 161472 - DNA, 20 bp, Homo sapiens
  source 1..20: mol_type = genomic DNA
tcattttggtagagtggaaa

SEQ ID NO: 161473 - DNA, 20 bp, Homo sapiens
  source 1..20: mol_type = genomic DNA
cattttggtagagtggaaag

SEQ ID NO: 161474 - DNA, 20 bp, Homo sapiens
  source 1..20: mol_type = genomic DNA
attttggtagagtggaaagg

SEQ ID NO: 161475 - DNA, 20 bp, Homo sapiens
  source 1..20: mol_type = genomic DNA
ttttggtagagtggaaaggt

SEQ ID NO: 161476 - DNA, 20 bp, Homo sapiens
  source 1..20: mol_type = genomic DNA
tttggtagagtggaaaggtt

SEQ ID NO: 161477 - DNA, 20 bp, Homo sapiens
  source 1..20: mol_type = genomic DNA
ttggtagagtggaaaggtta

SEQ ID NO: 161478 - DNA, 20 bp, Homo sapiens
  source 1..20: mol_type = genomic DNA
tggtagagtggaaaggttac

SEQ ID NO: 161479 - DNA, 20 bp, Homo sapiens
  source 1..20: mol_type = genomic DNA
ggtagagtggaaaggttacc

SEQ ID NO: 161480 - DNA, 20 bp, Homo sapiens
  source 1..20: mol_type = genomic DNA
gtagagtggaaaggttacct

SEQ ID NO: 161481 - DNA, 20 bp, Homo sapiens
  source 1..20: mol_type = genomic DNA
tagagtggaaaggttaccta

SEQ ID NO: 161482 - DNA, 20 bp, Homo sapiens
  source 1..20: mol_type = genomic DNA
agagtggaaaggttacctag

SEQ ID NO: 161483 - DNA, 20 bp, Homo sapiens
  source 1..20: mol_type = genomic DNA
gagtggaaaggttacctagg

SEQ ID NO: 161484 - DNA, 20 bp, Homo sapiens
  source 1..20: mol_type = genomic DNA
agtggaaaggttacctaggt

SEQ ID NO: 161485 - DNA, 20 bp, Homo sapiens
  source 1..20: mol_type = genomic DNA
gtggaaaggttacctaggtt

SEQ ID NO: 161486 - DNA, 20 bp, Homo sapiens
  source 1..20: mol_type = genomic DNA
tggaaaggttacctaggttt

SEQ ID NO: 161487 - DNA, 20 bp, Homo sapiens
  source 1..20: mol_type = genomic DNA
ggaaaggttacctaggtttc

SEQ ID NO: 161488 - DNA, 20 bp, Homo sapiens
  source 1..20: mol_type = genomic DNA
gaaaggttacctaggtttca

SEQ ID NO: 161489 - DNA, 20 bp, Homo sapiens
  source 1..20: mol_type = genomic DNA
aaaggttacctaggtttcag

SEQ ID NO: 161490 - DNA, 20 bp, Homo sapiens
  source 1..20: mol_type = genomic DNA
aaggttacctaggtttcagt

SEQ ID NO: 161491 - DNA, 20 bp, Homo sapiens
  source 1..20: mol_type = genomic DNA
aggttacctaggtttcagtg

SEQ ID NO: 161492 - DNA, 20 bp, Homo sapiens
  source 1..20: mol_type = genomic DNA
ggttacctaggtttcagtgc

SEQ ID NO: 161493 - DNA, 20 bp, Homo sapiens
  source 1..20: mol_type = genomic DNA
gttacctaggtttcagtgct

SEQ ID NO: 161494 - DNA, 20 bp, Homo sapiens
  source 1..20: mol_type = genomic DNA
ttacctaggtttcagtgctt

SEQ ID NO: 161495 - DNA, 20 bp, Homo sapiens
  source 1..20: mol_type = genomic DNA
tacctaggtttcagtgcttg

SEQ ID NO: 161496 - DNA, 20 bp, Homo sapiens
  source 1..20: mol_type = genomic DNA
acctaggtttcagtgcttga

SEQ ID NO: 161497 - DNA, 20 bp, Homo sapiens
  source 1..20: mol_type = genomic DNA
cctaggtttcagtgcttgaa

SEQ ID NO: 161498 - DNA, 20 bp, Homo sapiens
  source 1..20: mol_type = genomic DNA
ctaggtttcagtgcttgaaa

SEQ ID NO: 161499 - DNA, 20 bp, Homo sapiens
  source 1..20: mol_type = genomic DNA
taggtttcagtgcttgaaaa

SEQ ID NO: 161500 - DNA, 20 bp, Homo sapiens
  source 1..20: mol_type = genomic DNA
aggtttcagtgcttgaaaag

SEQ ID NO: 161501 - DNA, 20 bp, Homo sapiens
  source 1..20: mol_type = genomic DNA
ggtttcagtgcttgaaaaga

SEQ ID NO: 161502 - DNA, 20 bp, Homo sapiens
  source 1..20: mol_type = genomic DNA
gtttcagtgcttgaaaagat

SEQ ID NO: 161503 - DNA, 20 bp, Homo sapiens
  source 1..20: mol_type = genomic DNA
tttcagtgcttgaaaagatt

SEQ ID NO: 161504 - DNA, 20 bp, Homo sapiens
  source 1..20: mol_type = genomic DNA
ttcagtgcttgaaaagattt

SEQ ID NO: 161505 - DNA, 20 bp, Homo sapiens
  source 1..20: mol_type = genomic DNA
tcagtgcttgaaaagatttc

SEQ ID NO: 161506 - DNA, 20 bp, Homo sapiens
  source 1..20: mol_type = genomic DNA
cagtgcttgaaaagatttca

SEQ ID NO: 161507 - DNA, 20 bp, Homo sapiens
  source 1..20: mol_type = genomic DNA
agtgcttgaaaagatttcag

SEQ ID NO: 161508 - DNA, 20 bp, Homo sapiens
  source 1..20: mol_type = genomic DNA
gtgcttgaaaagatttcaga

SEQ ID NO: 161509 - DNA, 20 bp, Homo sapiens
  source 1..20: mol_type = genomic DNA
tgcttgaaaagatttcagaa

SEQ ID NO: 161510 - DNA, 20 bp, Homo sapiens
  source 1..20: mol_type = genomic DNA
gcttgaaaagatttcagaaa

SEQ ID NO: 161511 - DNA, 20 bp, Homo sapiens
  source 1..20: mol_type = genomic DNA
cttgaaaagatttcagaaag

SEQ ID NO: 161512 - DNA, 20 bp, Homo sapiens
  source 1..20: mol_type = genomic DNA
ttgaaaagatttcagaaagc

SEQ ID NO: 161513 - DNA, 20 bp, Homo sapiens
  source 1..20: mol_type = genomic DNA
tgaaaagatttcagaaagca

SEQ ID NO: 161514 - DNA, 20 bp, Homo sapiens
  source 1..20: mol_type = genomic DNA
gaaaagatttcagaaagcag

SEQ ID NO: 161515 - DNA, 20 bp, Homo sapiens
  source 1..20: mol_type = genomic DNA
aaaagatttcagaaagcagt

SEQ ID NO: 161516 - DNA, 20 bp, Homo sapiens
  source 1..20: mol_type = genomic DNA
aaagatttcagaaagcagta

SEQ ID NO: 161517 - DNA, 20 bp, Homo sapiens
  source 1..20: mol_type = genomic DNA
aagatttcagaaagcagtag

SEQ ID NO: 161518 - DNA, 20 bp, Homo sapiens
  source 1..20: mol_type = genomic DNA
agatttcagaaagcagtagt

SEQ ID NO: 161519 - DNA, 20 bp, Homo sapiens
  source 1..20: mol_type = genomic DNA
gatttcagaaagcagtagta

SEQ ID NO: 161520 - DNA, 20 bp, Homo sapiens
  source 1..20: mol_type = genomic DNA
atttcagaaagcagtagtac

SEQ ID NO: 161521 - DNA, 20 bp, Homo sapiens
  source 1..20: mol_type = genomic DNA
tttcagaaagcagtagtacg

SEQ ID NO: 161522 - DNA, 20 bp, Homo sapiens
  source 1..20: mol_type = genomic DNA
ttcagaaagcagtagtacgt

SEQ ID NO: 161523 - DNA, 20 bp, Homo sapiens
  source 1..20: mol_type = genomic DNA
tcagaaagcagtagtacgtc

SEQ ID NO: 161524 - DNA, 20 bp, Homo sapiens
  source 1..20: mol_type = genomic DNA
cagaaagcagtagtacgtct

SEQ ID NO: 161525 - DNA, 20 bp, Homo sapiens
  source 1..20: mol_type = genomic DNA
agaaagcagtagtacgtctg

SEQ ID NO: 161526 - DNA, 20 bp, Homo sapiens
  source 1..20: mol_type = genomic DNA
gaaagcagtagtacgtctgg

SEQ ID NO: 161527 - DNA, 20 bp, Homo sapiens
  source 1..20: mol_type = genomic DNA
aaagcagtagtacgtctggt

SEQ ID NO: 161528 - DNA, 20 bp, Homo sapiens
  source 1..20: mol_type = genomic DNA
aagcagtagtacgtctggtt

SEQ ID NO: 161529 - DNA, 20 bp, Homo sapiens
  source 1..20: mol_type = genomic DNA
agcagtagtacgtctggtta

SEQ ID NO: 161530 - DNA, 20 bp, Homo sapiens
  source 1..20: mol_type = genomic DNA
gcagtagtacgtctggttag

SEQ ID NO: 161531 - DNA, 20 bp, Homo sapiens
  source 1..20: mol_type = genomic DNA
cagtagtacgtctggttaga

SEQ ID NO: 161532 - DNA, 20 bp, Homo sapiens
  source 1..20: mol_type = genomic DNA
agtagtacgtctggttagac

SEQ ID NO: 161533 - DNA, 20 bp, Homo sapiens
  source 1..20: mol_type = genomic DNA
gtagtacgtctggttagact

SEQ ID NO: 161534 - DNA, 20 bp, Homo sapiens
  source 1..20: mol_type = genomic DNA
tagtacgtctggttagacta

SEQ ID NO: 161535 - DNA, 20 bp, Homo sapiens
  source 1..20: mol_type = genomic DNA
agtacgtctggttagactag

SEQ ID NO: 161536 - DNA, 20 bp, Homo sapiens
  source 1..20: mol_type = genomic DNA
gtacgtctggttagactaga

SEQ ID NO: 161537 - DNA, 20 bp, Homo sapiens
  source 1..20: mol_type = genomic DNA
tacgtctggttagactagaa

SEQ ID NO: 161538 - DNA, 20 bp, Homo sapiens
  source 1..20: mol_type = genomic DNA
acgtctggttagactagaat

SEQ ID NO: 161539 - DNA, 20 bp, Homo sapiens
  source 1..20: mol_type = genomic DNA
cgtctggttagactagaatc

SEQ ID NO: 161540 - DNA, 20 bp, Homo sapiens
  source 1..20: mol_type = genomic DNA
gtctggttagactagaatca

SEQ ID NO: 161541 - DNA, 20 bp, Homo sapiens
  source 1..20: mol_type = genomic DNA
tctggttagactagaatcag

SEQ ID NO: 161542 - DNA, 20 bp, Homo sapiens
  source 1..20: mol_type = genomic DNA
ctggttagactagaatcagt

SEQ ID NO: 161543 - DNA, 20 bp, Homo sapiens
  source 1..20: mol_type = genomic DNA
tggttagactagaatcagtc

SEQ ID NO: 161544 - DNA, 20 bp, Homo sapiens
  source 1..20: mol_type = genomic DNA
ggttagactagaatcagtcc

SEQ ID NO: 161545 - DNA, 20 bp, Homo sapiens
  source 1..20: mol_type = genomic DNA
gttagactagaatcagtcct

SEQ ID NO: 161546 - DNA, 20 bp, Homo sapiens
  source 1..20: mol_type = genomic DNA
ttagactagaatcagtcctc

SEQ ID NO: 161547 - DNA, 20 bp, Homo sapiens
  source 1..20: mol_type = genomic DNA
tagactagaatcagtcctct

SEQ ID NO: 161548 - DNA, 20 bp, Homo sapiens
  source 1..20: mol_type = genomic DNA
agactagaatcagtcctctc

SEQ ID NO: 161549 - DNA, 20 bp, Homo sapiens
  source 1..20: mol_type = genomic DNA
gactagaatcagtcctctcc

SEQ ID NO: 161550 - DNA, 20 bp, Homo sapiens
  source 1..20: mol_type = genomic DNA
actagaatcagtcctctcct

SEQ ID NO: 161551 - DNA, 20 bp, Homo sapiens
  source 1..20: mol_type = genomic DNA
ctagaatcagtcctctcctg

SEQ ID NO: 161552 - DNA, 20 bp, Homo sapiens
  source 1..20: mol_type = genomic DNA
tagaatcagtcctctcctgg

SEQ ID NO: 161553 - DNA, 20 bp, Homo sapiens
  source 1..20: mol_type = genomic DNA
agaatcagtcctctcctggg

SEQ ID NO: 161554 - DNA, 20 bp, Homo sapiens
  source 1..20: mol_type = genomic DNA
gaatcagtcctctcctgggg

SEQ ID NO: 161555 - DNA, 20 bp, Homo sapiens
  source 1..20: mol_type = genomic DNA
aatcagtcctctcctggggg

SEQ ID NO: 161556 - DNA, 20 bp, Homo sapiens
  source 1..20: mol_type = genomic DNA
atcagtcctctcctgggggc

SEQ ID NO: 161557 - DNA, 20 bp, Homo sapiens
  source 1..20: mol_type = genomic DNA
tcagtcctctcctgggggca

SEQ ID NO: 161558 - DNA, 20 bp, Homo sapiens
  source 1..20: mol_type = genomic DNA
cagtcctctcctgggggcag

SEQ ID NO: 161559 - DNA, 20 bp, Homo sapiens
  source 1..20: mol_type = genomic DNA
agtcctctcctgggggcagt

SEQ ID NO: 161560 - DNA, 20 bp, Homo sapiens
  source 1..20: mol_type = genomic DNA
gtcctctcctgggggcagtg

SEQ ID NO: 161561 - DNA, 20 bp, Homo sapiens
  source 1..20: mol_type = genomic DNA
tcctctcctgggggcagtgg

SEQ ID NO: 161562 - DNA, 20 bp, Homo sapiens
  source 1..20: mol_type = genomic DNA
cctctcctgggggcagtgga

SEQ ID NO: 161563 - DNA, 20 bp, Homo sapiens
  source 1..20: mol_type = genomic DNA
ctctcctgggggcagtggaa

SEQ ID NO: 161564 - DNA, 20 bp, Homo sapiens
  source 1..20: mol_type = genomic DNA
tctcctgggggcagtggaat

SEQ ID NO: 161565 - DNA, 20 bp, Homo sapiens
  source 1..20: mol_type = genomic DNA
ctcctgggggcagtggaata

SEQ ID NO: 161566 - DNA, 20 bp, Homo sapiens
  source 1..20: mol_type = genomic DNA
tcctgggggcagtggaatat

SEQ ID NO: 161567 - DNA, 20 bp, Homo sapiens
  source 1..20: mol_type = genomic DNA
cctgggggcagtggaatata

SEQ ID NO: 161568 - DNA, 20 bp, Homo sapiens
  source 1..20: mol_type = genomic DNA
ctgggggcagtggaatataa

SEQ ID NO: 161569 - DNA, 20 bp, Homo sapiens
  source 1..20: mol_type = genomic DNA
tgggggcagtggaatataat

SEQ ID NO: 161570 - DNA, 20 bp, Homo sapiens
  source 1..20: mol_type = genomic DNA
gggggcagtggaatataata

SEQ ID NO: 161571 - DNA, 20 bp, Homo sapiens
  source 1..20: mol_type = genomic DNA
ggggcagtggaatataatat

SEQ ID NO: 161572 - DNA, 20 bp, Homo sapiens
  source 1..20: mol_type = genomic DNA
gggcagtggaatataatatt

SEQ ID NO: 161573 - DNA, 20 bp, Homo sapiens
  source 1..20: mol_type = genomic DNA
ggcagtggaatataatattt

SEQ ID NO: 161574 - DNA, 20 bp, Homo sapiens
  source 1..20: mol_type = genomic DNA
gcagtggaatataatatttt

SEQ ID NO: 161575 - DNA, 20 bp, Homo sapiens
  source 1..20: mol_type = genomic DNA
cagtggaatataatattttc

SEQ ID NO: 161576 - DNA, 20 bp, Homo sapiens
  source 1..20: mol_type = genomic DNA
agtggaatataatattttct

SEQ ID NO: 161577 - DNA, 20 bp, Homo sapiens
  source 1..20: mol_type = genomic DNA
gtggaatataatattttctg

SEQ ID NO: 161578 - DNA, 20 bp, Homo sapiens
  source 1..20: mol_type = genomic DNA
tggaatataatattttctga

SEQ ID NO: 161579 - DNA, 20 bp, Homo sapiens
  source 1..20: mol_type = genomic DNA
ggaatataatattttctgac

SEQ ID NO: 161580 - DNA, 20 bp, Homo sapiens
  source 1..20: mol_type = genomic DNA
gaatataatattttctgact

SEQ ID NO: 161581 - DNA, 20 bp, Homo sapiens
  source 1..20: mol_type = genomic DNA
aatataatattttctgactg

SEQ ID NO: 161582 - DNA, 20 bp, Homo sapiens
  source 1..20: mol_type = genomic DNA
atataatattttctgactgc

SEQ ID NO: 161583 - DNA, 20 bp, Homo sapiens
  source 1..20: mol_type = genomic DNA
tataatattttctgactgct

SEQ ID NO: 161584 - DNA, 20 bp, Homo sapiens
  source 1..20: mol_type = genomic DNA
ataatattttctgactgcta

SEQ ID NO: 161585 - DNA, 20 bp, Homo sapiens
  source 1..20: mol_type = genomic DNA
taatattttctgactgctaa

SEQ ID NO: 161586 - DNA, 20 bp, Homo sapiens
  source 1..20: mol_type = genomic DNA
aatattttctgactgctaat

SEQ ID NO: 161587 - DNA, 20 bp, Homo sapiens
  source 1..20: mol_type = genomic DNA
atattttctgactgctaatt

SEQ ID NO: 161588 - DNA, 20 bp, Homo sapiens
  source 1..20: mol_type = genomic DNA
tattttctgactgctaatta

SEQ ID NO: 161589 - DNA, 20 bp, Homo sapiens
  source 1..20: mol_type = genomic DNA
attttctgactgctaattaa

SEQ ID NO: 161590 - DNA, 20 bp, Homo sapiens
  source 1..20: mol_type = genomic DNA
ttttctgactgctaattaaa

SEQ ID NO: 161591 - DNA, 20 bp, Homo sapiens
  source 1..20: mol_type = genomic DNA
tttctgactgctaattaaaa

SEQ ID NO: 161592 - DNA, 20 bp, Homo sapiens
  source 1..20: mol_type = genomic DNA
ttctgactgctaattaaaaa

SEQ ID NO: 161593 - DNA, 20 bp, Homo sapiens
  source 1..20: mol_type = genomic DNA
tctgactgctaattaaaaat

SEQ ID NO: 161594 - DNA, 20 bp, Homo sapiens
  source 1..20: mol_type = genomic DNA
ctgactgctaattaaaaata

SEQ ID NO: 161595 - DNA, 20 bp, Homo sapiens
  source 1..20: mol_type = genomic DNA
tgactgctaattaaaaatac

SEQ ID NO: 161596 - DNA, 20 bp, Homo sapiens
  source 1..20: mol_type = genomic DNA
gactgctaattaaaaatacc

SEQ ID NO: 161597 - DNA, 20 bp, Homo sapiens
  source 1..20: mol_type = genomic DNA
actgctaattaaaaatacct

SEQ ID NO: 161598 - DNA, 20 bp, Homo sapiens
  source 1..20: mol_type = genomic DNA
ctgctaattaaaaatacctg

SEQ ID NO: 161599 - DNA, 20 bp, Homo sapiens
  source 1..20: mol_type = genomic DNA
tgctaattaaaaatacctgt

SEQ ID NO: 161600 - DNA, 20 bp, Homo sapiens
  source 1..20: mol_type = genomic DNA
gctaattaaaaatacctgtg

SEQ ID NO: 161601 - DNA, 20 bp, Homo sapiens
  source 1..20: mol_type = genomic DNA
ctaattaaaaatacctgtga

SEQ ID NO: 161602 - DNA, 20 bp, Homo sapiens
  source 1..20: mol_type = genomic DNA
taattaaaaatacctgtgat

SEQ ID NO: 161603 - DNA, 20 bp, Homo sapiens
  source 1..20: mol_type = genomic DNA
aattaaaaatacctgtgata

SEQ ID NO: 161604 - DNA, 20 bp, Homo sapiens
  source 1..20: mol_type = genomic DNA
attaaaaatacctgtgatag

SEQ ID NO: 161605 - DNA, 20 bp, Homo sapiens
  source 1..20: mol_type = genomic DNA
ttaaaaatacctgtgatagc

SEQ ID NO: 161606 - DNA, 20 bp, Homo sapiens
  source 1..20: mol_type = genomic DNA
taaaaatacctgtgatagcc

SEQ ID NO: 161607 - DNA, 20 bp, Homo sapiens
  source 1..20: mol_type = genomic DNA
aaaaatacctgtgatagccg

SEQ ID NO: 161608 - DNA, 20 bp, Homo sapiens
  source 1..20: mol_type = genomic DNA
aaaatacctgtgatagccgg

SEQ ID NO: 161609 - DNA, 20 bp, Homo sapiens
  source 1..20: mol_type = genomic DNA
aaatacctgtgatagccggg

SEQ ID NO: 161610 - DNA, 20 bp, Homo sapiens
  source 1..20: mol_type = genomic DNA
aatacctgtgatagccgggc

SEQ ID NO: 161611 - DNA, 20 bp, Homo sapiens
  source 1..20: mol_type = genomic DNA
atacctgtgatagccgggcg

SEQ ID NO: 161612 - DNA, 20 bp, Homo sapiens
  source 1..20: mol_type = genomic DNA
tacctgtgatagccgggcgt

SEQ ID NO: 161613 - DNA, 20 bp, Homo sapiens
  source 1..20: mol_type = genomic DNA
acctgtgatagccgggcgtg

SEQ ID NO: 161614 - DNA, 20 bp, Homo sapiens
  source 1..20: mol_type = genomic DNA
cctgtgatagccgggcgtgg

SEQ ID NO: 161615 - DNA, 20 bp, Homo sapiens
  source 1..20: mol_type = genomic DNA
ctgtgatagccgggcgtggt

SEQ ID NO: 161616 - DNA, 20 bp, Homo sapiens
  source 1..20: mol_type = genomic DNA
tgtgatagccgggcgtggtg

SEQ ID NO: 161617 - DNA, 20 bp, Homo sapiens
  source 1..20: mol_type = genomic DNA
gtgatagccgggcgtggtgg

SEQ ID NO: 161618 - DNA, 20 bp, Homo sapiens
  source 1..20: mol_type = genomic DNA
tgatagccgggcgtggtggc

SEQ ID NO: 161619 - DNA, 20 bp, Homo sapiens
  source 1..20: mol_type = genomic DNA
gatagccgggcgtggtggct

SEQ ID NO: 161620 - DNA, 20 bp, Homo sapiens
  source 1..20: mol_type = genomic DNA
atagccgggcgtggtggctt

SEQ ID NO: 161621 - DNA, 20 bp, Homo sapiens
  source 1..20: mol_type = genomic DNA
tagccgggcgtggtggctta

SEQ ID NO: 161622 - DNA, 20 bp, Homo sapiens
  source 1..20: mol_type = genomic DNA
agccgggcgtggtggcttac

SEQ ID NO: 161623 - DNA, 20 bp, Homo sapiens
  source 1..20: mol_type = genomic DNA
gccgggcgtggtggcttacg

SEQ ID NO: 161624 - DNA, 20 bp, Homo sapiens
  source 1..20: mol_type = genomic DNA
ccgggcgtggtggcttacgc

SEQ ID NO: 161625 - DNA, 20 bp, Homo sapiens
  source 1..20: mol_type = genomic DNA
cgggcgtggtggcttacgcc

SEQ ID NO: 161626 - DNA, 20 bp, Homo sapiens
  source 1..20: mol_type = genomic DNA
gggcgtggtggcttacgcct

SEQ ID NO: 161627 - DNA, 20 bp, Homo sapiens
  source 1..20: mol_type = genomic DNA
ggcgtggtggcttacgcctg

SEQ ID NO: 161628 - DNA, 20 bp, Homo sapiens
  source 1..20: mol_type = genomic DNA
gcgtggtggcttacgcctgt

SEQ ID NO: 161629 - DNA, 20 bp, Homo sapiens
  source 1..20: mol_type = genomic DNA
cgtggtggcttacgcctgta

SEQ ID NO: 161630 - DNA, 20 bp, Homo sapiens
  source 1..20: mol_type = genomic DNA
gtggtggcttacgcctgtaa

SEQ ID NO: 161631 - DNA, 20 bp, Homo sapiens
  source 1..20: mol_type = genomic DNA
tggtggcttacgcctgtaat

SEQ ID NO: 161632 - DNA, 20 bp, Homo sapiens
  source 1..20: mol_type = genomic DNA
ggtggcttacgcctgtaatc

SEQ ID NO: 161633 - DNA, 20 bp, Homo sapiens
  source 1..20: mol_type = genomic DNA
gtggcttacgcctgtaatcc

SEQ ID NO: 161634 - DNA, 20 bp, Homo sapiens
  source 1..20: mol_type = genomic DNA
tggcttacgcctgtaatccc

SEQ ID NO: 161635 - DNA, 20 bp, Homo sapiens
  source 1..20: mol_type = genomic DNA
ggcttacgcctgtaatccca

SEQ ID NO: 161636 - DNA, 20 bp, Homo sapiens
  source 1..20: mol_type = genomic DNA
gcttacgcctgtaatcccag

SEQ ID NO: 161637 - DNA, 20 bp, Homo sapiens
  source 1..20: mol_type = genomic DNA
cttacgcctgtaatcccagc

SEQ ID NO: 161638 - DNA, 20 bp, Homo sapiens
  source 1..20: mol_type = genomic DNA
ttacgcctgtaatcccagca

SEQ ID NO: 161639 - DNA, 20 bp, Homo sapiens
  source 1..20: mol_type = genomic DNA
tacgcctgtaatcccagcac

SEQ ID NO: 161640 - DNA, 20 bp, Homo sapiens
  source 1..20: mol_type = genomic DNA
acgcctgtaatcccagcact

SEQ ID NO: 161641 - DNA, 20 bp, Homo sapiens
  source 1..20: mol_type = genomic DNA
cgcctgtaatcccagcactt

SEQ ID NO: 161642 - DNA, 20 bp, Homo sapiens
  source 1..20: mol_type = genomic DNA
gcctgtaatcccagcacttt

SEQ ID NO: 161643 - DNA, 20 bp, Homo sapiens
  source 1..20: mol_type = genomic DNA
cctgtaatcccagcactttg

SEQ ID NO: 161644 - DNA, 20 bp, Homo sapiens
  source 1..20: mol_type = genomic DNA
ctgtaatcccagcactttgg

SEQ ID NO: 161645 - DNA, 20 bp, Homo sapiens
  source 1..20: mol_type = genomic DNA
tgtaatcccagcactttggg

SEQ ID NO: 161646 - DNA, 20 bp, Homo sapiens
  source 1..20: mol_type = genomic DNA
gtaatcccagcactttggga

SEQ ID NO: 161647 - DNA, 20 bp, Homo sapiens
  source 1..20: mol_type = genomic DNA
taatcccagcactttgggag

SEQ ID NO: 161648 - DNA, 20 bp, Homo sapiens
  source 1..20: mol_type = genomic DNA
aatcccagcactttgggagg

SEQ ID NO: 161649 - DNA, 20 bp, Homo sapiens
  source 1..20: mol_type = genomic DNA
atcccagcactttgggaggc

SEQ ID NO: 161650 - DNA, 20 bp, Homo sapiens
  source 1..20: mol_type = genomic DNA
tcccagcactttgggaggcc

SEQ ID NO: 161651 - DNA, 20 bp, Homo sapiens
  source 1..20: mol_type = genomic DNA
cccagcactttgggaggccg

SEQ ID NO: 161652 - DNA, 20 bp, Homo sapiens
  source 1..20: mol_type = genomic DNA
ccagcactttgggaggccga

SEQ ID NO: 161653 - DNA, 20 bp, Homo sapiens
  source 1..20: mol_type = genomic DNA
cagcactttgggaggccgag

SEQ ID NO: 161654 - DNA, 20 bp, Homo sapiens
  source 1..20: mol_type = genomic DNA
agcactttgggaggccgaga

SEQ ID NO: 161655 - DNA, 20 bp, Homo sapiens
  source 1..20: mol_type = genomic DNA
gcactttgggaggccgagac

SEQ ID NO: 161656 - DNA, 20 bp, Homo sapiens
  source 1..20: mol_type = genomic DNA
cactttgggaggccgagacg

SEQ ID NO: 161657 - DNA, 20 bp, Homo sapiens
  source 1..20: mol_type = genomic DNA
actttgggaggccgagacgg

SEQ ID NO: 161658 - DNA, 20 bp, Homo sapiens
  source 1..20: mol_type = genomic DNA
ctttgggaggccgagacggg

SEQ ID NO: 161659 - DNA, 20 bp, Homo sapiens
  source 1..20: mol_type = genomic DNA
tttgggaggccgagacgggt

SEQ ID NO: 161660 - DNA, 20 bp, Homo sapiens
  source 1..20: mol_type = genomic DNA
ttgggaggccgagacgggtg

SEQ ID NO: 161661 - DNA, 20 bp, Homo sapiens
  source 1..20: mol_type = genomic DNA
tgggaggccgagacgggtgg

SEQ ID NO: 161662 - DNA, 20 bp, Homo sapiens
  source 1..20: mol_type = genomic DNA
gggaggccgagacgggtgga

SEQ ID NO: 161663 - DNA, 20 bp, Homo sapiens
  source 1..20: mol_type = genomic DNA
ggaggccgagacgggtggat

SEQ ID NO: 161664 - DNA, 20 bp, Homo sapiens
  source 1..20: mol_type = genomic DNA
gaggccgagacgggtggatc

SEQ ID NO: 161665 - DNA, 20 bp, Homo sapiens
  source 1..20: mol_type = genomic DNA
aggccgagacgggtggatca

SEQ ID NO: 161666 - DNA, 20 bp, Homo sapiens
  source 1..20: mol_type = genomic DNA
ggccgagacgggtggatcac

SEQ ID NO: 161667 - DNA, 20 bp, Homo sapiens
  source 1..20: mol_type = genomic DNA
gccgagacgggtggatcacg

SEQ ID NO: 161668 - DNA, 20 bp, Homo sapiens
  source 1..20: mol_type = genomic DNA
ccgagacgggtggatcacga

SEQ ID NO: 161669 - DNA, 20 bp, Homo sapiens
  source 1..20: mol_type = genomic DNA
cgagacgggtggatcacgag

SEQ ID NO: 161670 - DNA, 20 bp, Homo sapiens
  source 1..20: mol_type = genomic DNA
gagacgggtggatcacgagg

SEQ ID NO: 161671 - DNA, 20 bp, Homo sapiens
  source 1..20: mol_type = genomic DNA
agacgggtggatcacgaggt

SEQ ID NO: 161672 - DNA, 20 bp, Homo sapiens
  source 1..20: mol_type = genomic DNA
gacgggtggatcacgaggtc

SEQ ID NO: 161673 - DNA, 20 bp, Homo sapiens
  source 1..20: mol_type = genomic DNA
acgggtggatcacgaggtca

SEQ ID NO: 161674 - DNA, 20 bp, Homo sapiens
  source 1..20: mol_type = genomic DNA
cgggtggatcacgaggtcag

SEQ ID NO: 161675 - DNA, 20 bp, Homo sapiens
  source 1..20: mol_type = genomic DNA
gggtggatcacgaggtcagc

SEQ ID NO: 161676 - DNA, 20 bp, Homo sapiens
  source 1..20: mol_type = genomic DNA
ggtggatcacgaggtcagca

SEQ ID NO: 161677 - DNA, 20 bp, Homo sapiens
  source 1..20: mol_type = genomic DNA
gtggatcacgaggtcagcag

SEQ ID NO: 161678 - DNA, 20 bp, Homo sapiens
  source 1..20: mol_type = genomic DNA
tggatcacgaggtcagcaga

SEQ ID NO: 161679 - DNA, 20 bp, Homo sapiens
  source 1..20: mol_type = genomic DNA
ggatcacgaggtcagcagat

SEQ ID NO: 161680 - DNA, 20 bp, Homo sapiens
  source 1..20: mol_type = genomic DNA
gatcacgaggtcagcagatg

SEQ ID NO: 161681 - DNA, 20 bp, Homo sapiens
  source 1..20: mol_type = genomic DNA
atcacgaggtcagcagatgg

SEQ ID NO: 161682 - DNA, 20 bp, Homo sapiens
  source 1..20: mol_type = genomic DNA
tcacgaggtcagcagatgga

SEQ ID NO: 161683 - DNA, 20 bp, Homo sapiens
  source 1..20: mol_type = genomic DNA
cacgaggtcagcagatggag

SEQ ID NO: 161684 - DNA, 20 bp, Homo sapiens
  source 1..20: mol_type = genomic DNA
acgaggtcagcagatggaga

SEQ ID NO: 161685 - DNA, 20 bp, Homo sapiens
  source 1..20: mol_type = genomic DNA
cgaggtcagcagatggagac

SEQ ID NO: 161686 - DNA, 20 bp, Homo sapiens
  source 1..20: mol_type = genomic DNA
gaggtcagcagatggagacc

SEQ ID NO: 161687 - DNA, 20 bp, Homo sapiens
  source 1..20: mol_type = genomic DNA
aggtcagcagatggagacca

SEQ ID NO: 161688 - DNA, 20 bp, Homo sapiens
  source 1..20: mol_type = genomic DNA
ggtcagcagatggagaccat

SEQ ID NO: 161689 - DNA, 20 bp, Homo sapiens
  source 1..20: mol_type = genomic DNA
gtcagcagatggagaccatc

SEQ ID NO: 161690 - DNA, 20 bp, Homo sapiens
  source 1..20: mol_type = genomic DNA
tcagcagatggagaccatcc

SEQ ID NO: 161691 - DNA, 20 bp, Homo sapiens
  source 1..20: mol_type = genomic DNA
cagcagatggagaccatcct

SEQ ID NO: 161692 - DNA, 20 bp, Homo sapiens
  source 1..20: mol_type = genomic DNA
agcagatggagaccatcctg

SEQ ID NO: 161693 - DNA, 20 bp, Homo sapiens
  source 1..20: mol_type = genomic DNA
gcagatggagaccatcctgg

SEQ ID NO: 161694 - DNA, 20 bp, Homo sapiens
  source 1..20: mol_type = genomic DNA
cagatggagaccatcctggc

SEQ ID NO: 161695 - DNA, 20 bp, Homo sapiens
  source 1..20: mol_type = genomic DNA
agatggagaccatcctggct

SEQ ID NO: 161696 - DNA, 20 bp, Homo sapiens
  source 1..20: mol_type = genomic DNA
gatggagaccatcctggcta

SEQ ID NO: 161697 - DNA, 20 bp, Homo sapiens
  source 1..20: mol_type = genomic DNA
atggagaccatcctggctaa

SEQ ID NO: 161698 - DNA, 20 bp, Homo sapiens
  source 1..20: mol_type = genomic DNA
tggagaccatcctggctaac

SEQ ID NO: 161699 - DNA, 20 bp, Homo sapiens
  source 1..20: mol_type = genomic DNA
ggagaccatcctggctaaca

SEQ ID NO: 161700 - DNA, 20 bp, Homo sapiens
  source 1..20: mol_type = genomic DNA
gagaccatcctggctaacac

SEQ ID NO: 161701 - DNA, 20 bp, Homo sapiens
  source 1..20: mol_type = genomic DNA
agaccatcctggctaacacg

SEQ ID NO: 161702 - DNA, 20 bp, Homo sapiens
  source 1..20: mol_type = genomic DNA
gaccatcctggctaacacgg

SEQ ID NO: 161703 - DNA, 20 bp, Homo sapiens
  source 1..20: mol_type = genomic DNA
accatcctggctaacacggt

SEQ ID NO: 161704 - DNA, 20 bp, Homo sapiens
  source 1..20: mol_type = genomic DNA
ccatcctggctaacacggtg

SEQ ID NO: 161705 - DNA, 20 bp, Homo sapiens
  source 1..20: mol_type = genomic DNA
catcctggctaacacggtga

SEQ ID NO: 161706 - DNA, 20 bp, Homo sapiens
  source 1..20: mol_type = genomic DNA
atcctggctaacacggtgaa

SEQ ID NO: 161707 - DNA, 20 bp, Homo sapiens
  source 1..20: mol_type = genomic DNA
tcctggctaacacggtgaaa

SEQ ID NO: 161708 - DNA, 20 bp, Homo sapiens
  source 1..20: mol_type = genomic DNA
cctggctaacacggtgaaac

SEQ ID NO: 161709 - DNA, 20 bp, Homo sapiens
  source 1..20: mol_type = genomic DNA
ctggctaacacggtgaaacc

SEQ ID NO: 161710 - DNA, 20 bp, Homo sapiens
  source 1..20: mol_type = genomic DNA
tggctaacacggtgaaaccc

SEQ ID NO: 161711 - DNA, 20 bp, Homo sapiens
  source 1..20: mol_type = genomic DNA
ggctaacacggtgaaacccc

SEQ ID NO: 161712 - DNA, 20 bp, Homo sapiens
  source 1..20: mol_type = genomic DNA
gctaacacggtgaaaccccg

SEQ ID NO: 161713 - DNA, 20 bp, Homo sapiens
  source 1..20: mol_type = genomic DNA
ctaacacggtgaaaccccgt

SEQ ID NO: 161714 - DNA, 20 bp, Homo sapiens
  source 1..20: mol_type = genomic DNA
taacacggtgaaaccccgtc

SEQ ID NO: 161715 - DNA, 20 bp, Homo sapiens
  source 1..20: mol_type = genomic DNA
aacacggtgaaaccccgtct

SEQ ID NO: 161716 - DNA, 20 bp, Homo sapiens
  source 1..20: mol_type = genomic DNA
acacggtgaaaccccgtctc

SEQ ID NO: 161717 - DNA, 20 bp, Homo sapiens
  source 1..20: mol_type = genomic DNA
cacggtgaaaccccgtctct

SEQ ID NO: 161718 - DNA, 20 bp, Homo sapiens
  source 1..20: mol_type = genomic DNA
acggtgaaaccccgtctcta

SEQ ID NO: 161719 - DNA, 20 bp, Homo sapiens
  source 1..20: mol_type = genomic DNA
cggtgaaaccccgtctctac

SEQ ID NO: 161720 - DNA, 20 bp, Homo sapiens
  source 1..20: mol_type = genomic DNA
ggtgaaaccccgtctctact

SEQ ID NO: 161721 - DNA, 20 bp, Homo sapiens
  source 1..20: mol_type = genomic DNA
gtgaaaccccgtctctacta

SEQ ID NO: 161722 - DNA, 20 bp, Homo sapiens
  source 1..20: mol_type = genomic DNA
tgaaaccccgtctctactaa

SEQ ID NO: 161723 - DNA, 20 bp, Homo sapiens
  source 1..20: mol_type = genomic DNA
gaaaccccgtctctactaaa

SEQ ID NO: 161724 - DNA, 20 bp, Homo sapiens
  source 1..20: mol_type = genomic DNA
aaaccccgtctctactaaaa

SEQ ID NO: 161725 - DNA, 20 bp, Homo sapiens
  source 1..20: mol_type = genomic DNA
aaccccgtctctactaaaaa

SEQ ID NO: 161726 - DNA, 20 bp, Homo sapiens
  source 1..20: mol_type = genomic DNA
accccgtctctactaaaaat

SEQ ID NO: 161727 - DNA, 20 bp, Homo sapiens
  source 1..20: mol_type = genomic DNA
ccccgtctctactaaaaatg

SEQ ID NO: 161728 - DNA, 20 bp, Homo sapiens
  source 1..20: mol_type = genomic DNA
cccgtctctactaaaaatgc

SEQ ID NO: 161729 - DNA, 20 bp, Homo sapiens
  source 1..20: mol_type = genomic DNA
ccgtctctactaaaaatgca

SEQ ID NO: 161730 - DNA, 20 bp, Homo sapiens
  source 1..20: mol_type = genomic DNA
cgtctctactaaaaatgcaa

SEQ ID NO: 161731 - DNA, 20 bp, Homo sapiens
  source 1..20: mol_type = genomic DNA
gtctctactaaaaatgcaaa

SEQ ID NO: 161732 - DNA, 20 bp, Homo sapiens
  source 1..20: mol_type = genomic DNA
tctctactaaaaatgcaaaa

SEQ ID NO: 161733 - DNA, 20 bp, Homo sapiens
  source 1..20: mol_type = genomic DNA
ctctactaaaaatgcaaaaa

SEQ ID NO: 161734 - DNA, 20 bp, Homo sapiens
  source 1..20: mol_type = genomic DNA
tctactaaaaatgcaaaaaa

SEQ ID NO: 161735 - DNA, 20 bp, Homo sapiens
  source 1..20: mol_type = genomic DNA
ctactaaaaatgcaaaaaaa

SEQ ID NO: 161736 - DNA, 20 bp, Homo sapiens
  source 1..20: mol_type = genomic DNA
tactaaaaatgcaaaaaaat

SEQ ID NO: 161737 - DNA, 20 bp, Homo sapiens
  source 1..20: mol_type = genomic DNA
actaaaaatgcaaaaaaatt

SEQ ID NO: 161738 - DNA, 20 bp, Homo sapiens
  source 1..20: mol_type = genomic DNA
ctaaaaatgcaaaaaaatta

SEQ ID NO: 161739 - DNA, 20 bp, Homo sapiens
  source 1..20: mol_type = genomic DNA
taaaaatgcaaaaaaattag

SEQ ID NO: 161740 - DNA, 20 bp, Homo sapiens
  source 1..20: mol_type = genomic DNA
aaaaatgcaaaaaaattagc

SEQ ID NO: 161741 - DNA, 20 bp, Homo sapiens
  source 1..20: mol_type = genomic DNA
aaaatgcaaaaaaattagcc

SEQ ID NO: 161742 - DNA, 20 bp, Homo sapiens
  source 1..20: mol_type = genomic DNA
aaatgcaaaaaaattagccg

SEQ ID NO: 161743 - DNA, 20 bp, Homo sapiens
  source 1..20: mol_type = genomic DNA
aatgcaaaaaaattagccgg

SEQ ID NO: 161744 - DNA, 20 bp, Homo sapiens
  source 1..20: mol_type = genomic DNA
atgcaaaaaaattagccggg

SEQ ID NO: 161745 - DNA, 20 bp, Homo sapiens
  source 1..20: mol_type = genomic DNA
tgcaaaaaaattagccgggt

SEQ ID NO: 161746 - DNA, 20 bp, Homo sapiens
  source 1..20: mol_type = genomic DNA
gcaaaaaaattagccgggtg

SEQ ID NO: 161747 - DNA, 20 bp, Homo sapiens
  source 1..20: mol_type = genomic DNA
caaaaaaattagccgggtgt

SEQ ID NO: 161748 - DNA, 20 bp, Homo sapiens
  source 1..20: mol_type = genomic DNA
aaaaaaattagccgggtgtg

SEQ ID NO: 161749 - DNA, 20 bp, Homo sapiens
  source 1..20: mol_type = genomic DNA
aaaaaattagccgggtgtgg

SEQ ID NO: 161750 - DNA, 20 bp, Homo sapiens
  source 1..20: mol_type = genomic DNA
aaaaattagccgggtgtggt

SEQ ID NO: 161751 - DNA, 20 bp, Homo sapiens
  source 1..20: mol_type = genomic DNA
aaaattagccgggtgtggtg

SEQ ID NO: 161752 - DNA, 20 bp, Homo sapiens
  source 1..20: mol_type = genomic DNA
aaattagccgggtgtggtgg

SEQ ID NO: 161753 - DNA, 20 bp, Homo sapiens
  source 1..20: mol_type = genomic DNA
aattagccgggtgtggtggt

SEQ ID NO: 161754 - DNA, 20 bp, Homo sapiens
  source 1..20: mol_type = genomic DNA
attagccgggtgtggtggtg

SEQ ID NO: 161755 - DNA, 20 bp, Homo sapiens
  source 1..20: mol_type = genomic DNA
ttagccgggtgtggtggtgg

SEQ ID NO: 161756 - DNA, 20 bp, Homo sapiens
  source 1..20: mol_type = genomic DNA
tagccgggtgtggtggtggg

SEQ ID NO: 161757 - DNA, 20 bp, Homo sapiens
  source 1..20: mol_type = genomic DNA
agccgggtgtggtggtgggc

SEQ ID NO: 161758 - DNA, 20 bp, Homo sapiens
  source 1..20: mol_type = genomic DNA
gccgggtgtggtggtgggcg

SEQ ID NO: 161759 - DNA, 20 bp, Homo sapiens
  source 1..20: mol_type = genomic DNA
ccgggtgtggtggtgggcgc

SEQ ID NO: 161760 - DNA, 20 bp, Homo sapiens
  source 1..20: mol_type = genomic DNA
cgggtgtggtggtgggcgcc

SEQ ID NO: 161761 - DNA, 20 bp, Homo sapiens
  source 1..20: mol_type = genomic DNA
gggtgtggtggtgggcgcct

SEQ ID NO: 161762 - DNA, 20 bp, Homo sapiens
  source 1..20: mol_type = genomic DNA
ggtgtggtggtgggcgcctg

SEQ ID NO: 161763 - DNA, 20 bp, Homo sapiens
  source 1..20: mol_type = genomic DNA
gtgtggtggtgggcgcctgt

SEQ ID NO: 161764 - DNA, 20 bp, Homo sapiens
  source 1..20: mol_type = genomic DNA
tgtggtggtgggcgcctgta

SEQ ID NO: 161765 - DNA, 20 bp, Homo sapiens
  source 1..20: mol_type = genomic DNA
gtggtggtgggcgcctgtag

SEQ ID NO: 161766 - DNA, 20 bp, Homo sapiens
  source 1..20: mol_type = genomic DNA
tggtggtgggcgcctgtagt

SEQ ID NO: 161767 - DNA, 20 bp, Homo sapiens
  source 1..20: mol_type = genomic DNA
ggtggtgggcgcctgtagtc

SEQ ID NO: 161768 - DNA, 20 bp, Homo sapiens
  source 1..20: mol_type = genomic DNA
gtggtgggcgcctgtagtcc

SEQ ID NO: 161769 - DNA, 20 bp, Homo sapiens
  source 1..20: mol_type = genomic DNA
tggtgggcgcctgtagtccc

SEQ ID NO: 161770 - DNA, 20 bp, Homo sapiens
  source 1..20: mol_type = genomic DNA
ggtgggcgcctgtagtccca

SEQ ID NO: 161771 - DNA, 20 bp, Homo sapiens
  source 1..20: mol_type = genomic DNA
gtgggcgcctgtagtcccag

SEQ ID NO: 161772 - DNA, 20 bp, Homo sapiens
  source 1..20: mol_type = genomic DNA
tgggcgcctgtagtcccagc

SEQ ID NO: 161773 - DNA, 20 bp, Homo sapiens
  source 1..20: mol_type = genomic DNA
gggcgcctgtagtcccagct

SEQ ID NO: 161774 - DNA, 20 bp, Homo sapiens
  source 1..20: mol_type = genomic DNA
ggcgcctgtagtcccagcta

SEQ ID NO: 161775 - DNA, 20 bp, Homo sapiens
  source 1..20: mol_type = genomic DNA
gcgcctgtagtcccagctac

SEQ ID NO: 161776 - DNA, 20 bp, Homo sapiens
  source 1..20: mol_type = genomic DNA
cgcctgtagtcccagctact

SEQ ID NO: 161777 - DNA, 20 bp, Homo sapiens
  source 1..20: mol_type = genomic DNA
gcctgtagtcccagctactc

SEQ ID NO: 161778 - DNA, 20 bp, Homo sapiens
  source 1..20: mol_type = genomic DNA
cctgtagtcccagctactca

SEQ ID NO: 161779 - DNA, 20 bp, Homo sapiens
  source 1..20: mol_type = genomic DNA
ctgtagtcccagctactcag

SEQ ID NO: 161780 - DNA, 20 bp, Homo sapiens
  source 1..20: mol_type = genomic DNA
tgtagtcccagctactcagg

SEQ ID NO: 161781 - DNA, 20 bp, Homo sapiens
  source 1..20: mol_type = genomic DNA
gtagtcccagctactcagga

SEQ ID NO: 161782 - DNA, 20 bp, Homo sapiens
  source 1..20: mol_type = genomic DNA
tagtcccagctactcaggag

SEQ ID NO: 161783 - DNA, 20 bp, Homo sapiens
  source 1..20: mol_type = genomic DNA
agtcccagctactcaggagg

SEQ ID NO: 161784 - DNA, 20 bp, Homo sapiens
  source 1..20: mol_type = genomic DNA
gtcccagctactcaggaggc

SEQ ID NO: 161785 - DNA, 20 bp, Homo sapiens
  source 1..20: mol_type = genomic DNA
tcccagctactcaggaggct

SEQ ID NO: 161786 - DNA, 20 bp, Homo sapiens
  source 1..20: mol_type = genomic DNA
cccagctactcaggaggctg

SEQ ID NO: 161787 - DNA, 20 bp, Homo sapiens
  source 1..20: mol_type = genomic DNA
ccagctactcaggaggctga

SEQ ID NO: 161788 - DNA, 20 bp, Homo sapiens
  source 1..20: mol_type = genomic DNA
cagctactcaggaggctgag

SEQ ID NO: 161789 - DNA, 20 bp, Homo sapiens
  source 1..20: mol_type = genomic DNA
agctactcaggaggctgagg

SEQ ID NO: 161790 - DNA, 20 bp, Homo sapiens
  source 1..20: mol_type = genomic DNA
gctactcaggaggctgaggc

SEQ ID NO: 161791 - DNA, 20 bp, Homo sapiens
  source 1..20: mol_type = genomic DNA
ctactcaggaggctgaggca

SEQ ID NO: 161792 - DNA, 20 bp, Homo sapiens
  source 1..20: mol_type = genomic DNA
tactcaggaggctgaggcag

SEQ ID NO: 161793 - DNA, 20 bp, Homo sapiens
  source 1..20: mol_type = genomic DNA
actcaggaggctgaggcagg

SEQ ID NO: 161794 - DNA, 20 bp, Homo sapiens
  source 1..20: mol_type = genomic DNA
ctcaggaggctgaggcagga

SEQ ID NO: 161795 - DNA, 20 bp, Homo sapiens
  source 1..20: mol_type = genomic DNA
tcaggaggctgaggcaggag

SEQ ID NO: 161796 - DNA, 20 bp, Homo sapiens
  source 1..20: mol_type = genomic DNA
caggaggctgaggcaggaga

SEQ ID NO: 161797 - DNA, 20 bp, Homo sapiens
  source 1..20: mol_type = genomic DNA
aggaggctgaggcaggagaa

SEQ ID NO: 161798 - DNA, 20 bp, Homo sapiens
  source 1..20: mol_type = genomic DNA
ggaggctgaggcaggagaat

SEQ ID NO: 161799 - DNA, 20 bp, Homo sapiens
  source 1..20: mol_type = genomic DNA
gaggctgaggcaggagaatg

SEQ ID NO: 161800 - DNA, 20 bp, Homo sapiens
  source 1..20: mol_type = genomic DNA
aggctgaggcaggagaatgg

SEQ ID NO: 161801 - DNA, 20 bp, Homo sapiens
  source 1..20: mol_type = genomic DNA
ggctgaggcaggagaatggc

SEQ ID NO: 161802 - DNA, 20 bp, Homo sapiens
  source 1..20: mol_type = genomic DNA
gctgaggcaggagaatggca

SEQ ID NO: 161803 - DNA, 20 bp, Homo sapiens
  source 1..20: mol_type = genomic DNA
ctgaggcaggagaatggcat

SEQ ID NO: 161804 - DNA, 20 bp, Homo sapiens
  source 1..20: mol_type = genomic DNA
tgaggcaggagaatggcatg

SEQ ID NO: 161805 - DNA, 20 bp, Homo sapiens
  source 1..20: mol_type = genomic DNA
gaggcaggagaatggcatga

SEQ ID NO: 161806 - DNA, 20 bp, Homo sapiens
  source 1..20: mol_type = genomic DNA
aggcaggagaatggcatgaa

SEQ ID NO: 161807 - DNA, 20 bp, Homo sapiens
  source 1..20: mol_type = genomic DNA
ggcaggagaatggcatgaac

SEQ ID NO: 161808 - DNA, 20 bp, Homo sapiens
  source 1..20: mol_type = genomic DNA
gcaggagaatggcatgaacc

SEQ ID NO: 161809 - DNA, 20 bp, Homo sapiens
  source 1..20: mol_type = genomic DNA
caggagaatggcatgaacct

SEQ ID NO: 161810 - DNA, 20 bp, Homo sapiens
  source 1..20: mol_type = genomic DNA
aggagaatggcatgaacctg

SEQ ID NO: 161811 - DNA, 20 bp, Homo sapiens
  source 1..20: mol_type = genomic DNA
ggagaatggcatgaacctgg

SEQ ID NO: 161812 - DNA, 20 bp, Homo sapiens
  source 1..20: mol_type = genomic DNA
gagaatggcatgaacctggg

SEQ ID NO: 161813 - DNA, 20 bp, Homo sapiens
  source 1..20: mol_type = genomic DNA
agaatggcatgaacctggga

SEQ ID NO: 161814 - DNA, 20 bp, Homo sapiens
  source 1..20: mol_type = genomic DNA
gaatggcatgaacctgggag

SEQ ID NO: 161815 - DNA, 20 bp, Homo sapiens
  source 1..20: mol_type = genomic DNA
aatggcatgaacctgggagg

SEQ ID NO: 161816 - DNA, 20 bp, Homo sapiens
  source 1..20: mol_type = genomic DNA
atggcatgaacctgggaggc

SEQ ID NO: 161817 - DNA, 20 bp, Homo sapiens
  source 1..20: mol_type = genomic DNA
tggcatgaacctgggaggcg

SEQ ID NO: 161818 - DNA, 20 bp, Homo sapiens
  source 1..20: mol_type = genomic DNA
ggcatgaacctgggaggcgg

SEQ ID NO: 161819 - DNA, 20 bp, Homo sapiens
  source 1..20: mol_type = genomic DNA
gcatgaacctgggaggcgga

SEQ ID NO: 161820 - DNA, 20 bp, Homo sapiens
  source 1..20: mol_type = genomic DNA
catgaacctgggaggcggag

SEQ ID NO: 161821 - DNA, 20 bp, Homo sapiens
  source 1..20: mol_type = genomic DNA
atgaacctgggaggcggagc

SEQ ID NO: 161822 - DNA, 20 bp, Homo sapiens
  source 1..20: mol_type = genomic DNA
tgaacctgggaggcggagct

SEQ ID NO: 161823 - DNA, 20 bp, Homo sapiens
  source 1..20: mol_type = genomic DNA
gaacctgggaggcggagctt

SEQ ID NO: 161824 - DNA, 20 bp, Homo sapiens
  source 1..20: mol_type = genomic DNA
aacctgggaggcggagcttg

SEQ ID NO: 161825 - DNA, 20 bp, Homo sapiens
  source 1..20: mol_type = genomic DNA
acctgggaggcggagcttgc

SEQ ID NO: 161826 - DNA, 20 bp, Homo sapiens
  source 1..20: mol_type = genomic DNA
cctgggaggcggagcttgca

SEQ ID NO: 161827 - DNA, 20 bp, Homo sapiens
  source 1..20: mol_type = genomic DNA
ctgggaggcggagcttgcag

SEQ ID NO: 161828 - DNA, 20 bp, Homo sapiens
  source 1..20: mol_type = genomic DNA
tgggaggcggagcttgcagt

SEQ ID NO: 161829 - DNA, 20 bp, Homo sapiens
  source 1..20: mol_type = genomic DNA
gggaggcggagcttgcagtg

SEQ ID NO: 161830 - DNA, 20 bp, Homo sapiens
  source 1..20: mol_type = genomic DNA
ggaggcggagcttgcagtga

SEQ ID NO: 161831 - DNA, 20 bp, Homo sapiens
  source 1..20: mol_type = genomic DNA
gaggcggagcttgcagtgag

SEQ ID NO: 161832 - DNA, 20 bp, Homo sapiens
  source 1..20: mol_type = genomic DNA
aggcggagcttgcagtgagc

SEQ ID NO: 161833 - DNA, 20 bp, Homo sapiens
  source 1..20: mol_type = genomic DNA
ggcggagcttgcagtgagcc

SEQ ID NO: 161834 - DNA, 20 bp, Homo sapiens
  source 1..20: mol_type = genomic DNA
gcggagcttgcagtgagccg

SEQ ID NO: 161835 - DNA, 20 bp, Homo sapiens
  source 1..20: mol_type = genomic DNA
cggagcttgcagtgagccga

SEQ ID NO: 161836 - DNA, 20 bp, Homo sapiens
  source 1..20: mol_type = genomic DNA
ggagcttgcagtgagccgag

SEQ ID NO: 161837 - DNA, 20 bp, Homo sapiens
  source 1..20: mol_type = genomic DNA
gagcttgcagtgagccgaga

SEQ ID NO: 161838 - DNA, 20 bp, Homo sapiens
  source 1..20: mol_type = genomic DNA
agcttgcagtgagccgagat

SEQ ID NO: 161839 - DNA, 20 bp, Homo sapiens
  source 1..20: mol_type = genomic DNA
gcttgcagtgagccgagatc

SEQ ID NO: 161840 - DNA, 20 bp, Homo sapiens
  source 1..20: mol_type = genomic DNA
cttgcagtgagccgagatca

SEQ ID NO: 161841 - DNA, 20 bp, Homo sapiens
  source 1..20: mol_type = genomic DNA
ttgcagtgagccgagatcat

SEQ ID NO: 161842 - DNA, 20 bp, Homo sapiens
  source 1..20: mol_type = genomic DNA
tgcagtgagccgagatcatg

SEQ ID NO: 161843 - DNA, 20 bp, Homo sapiens
  source 1..20: mol_type = genomic DNA
gcagtgagccgagatcatgt

SEQ ID NO: 161844 - DNA, 20 bp, Homo sapiens
  source 1..20: mol_type = genomic DNA
cagtgagccgagatcatgtc

SEQ ID NO: 161845 - DNA, 20 bp, Homo sapiens
  source 1..20: mol_type = genomic DNA
agtgagccgagatcatgtca

SEQ ID NO: 161846 - DNA, 20 bp, Homo sapiens
  source 1..20: mol_type = genomic DNA
gtgagccgagatcatgtcac

SEQ ID NO: 161847 - DNA, 20 bp, Homo sapiens
  source 1..20: mol_type = genomic DNA
tgagccgagatcatgtcact

SEQ ID NO: 161848 - DNA, 20 bp, Homo sapiens
  source 1..20: mol_type = genomic DNA
gagccgagatcatgtcactg

SEQ ID NO: 161849 - DNA, 20 bp, Homo sapiens
  source 1..20: mol_type = genomic DNA
agccgagatcatgtcactgc

SEQ ID NO: 161850 - DNA, 20 bp, Homo sapiens
  source 1..20: mol_type = genomic DNA
gccgagatcatgtcactgca

SEQ ID NO: 161851 - DNA, 20 bp, Homo sapiens
  source 1..20: mol_type = genomic DNA
ccgagatcatgtcactgcac

SEQ ID NO: 161852 - DNA, 20 bp, Homo sapiens
  source 1..20: mol_type = genomic DNA
cgagatcatgtcactgcact

SEQ ID NO: 161853 - DNA, 20 bp, Homo sapiens
  source 1..20: mol_type = genomic DNA
gagatcatgtcactgcactc

SEQ ID NO: 161854 - DNA, 20 bp, Homo sapiens
  source 1..20: mol_type = genomic DNA
agatcatgtcactgcactcc

SEQ ID NO: 161855 - DNA, 20 bp, Homo sapiens
  source 1..20: mol_type = genomic DNA
gatcatgtcactgcactcca

SEQ ID NO: 161856 - DNA, 20 bp, Homo sapiens
  source 1..20: mol_type = genomic DNA
atcatgtcactgcactccag

SEQ ID NO: 161857 - DNA, 20 bp, Homo sapiens
  source 1..20: mol_type = genomic DNA
tcatgtcactgcactccagc

SEQ ID NO: 161858 - DNA, 20 bp, Homo sapiens
  source 1..20: mol_type = genomic DNA
catgtcactgcactccagcc

SEQ ID NO: 161859 - DNA, 20 bp, Homo sapiens
  source 1..20: mol_type = genomic DNA
atgtcactgcactccagcct

SEQ ID NO: 161860 - DNA, 20 bp, Homo sapiens
  source 1..20: mol_type = genomic DNA
tgtcactgcactccagcctg

SEQ ID NO: 161861 - DNA, 20 bp, Homo sapiens
  source 1..20: mol_type = genomic DNA
gtcactgcactccagcctgg

SEQ ID NO: 161862 - DNA, 20 bp, Homo sapiens
  source 1..20: mol_type = genomic DNA
tcactgcactccagcctggg

SEQ ID NO: 161863 - DNA, 20 bp, Homo sapiens
  source 1..20: mol_type = genomic DNA
cactgcactccagcctgggc

SEQ ID NO: 161864 - DNA, 20 bp, Homo sapiens
  source 1..20: mol_type = genomic DNA
actgcactccagcctgggcg

SEQ ID NO: 161865 - DNA, 20 bp, Homo sapiens
  source 1..20: mol_type = genomic DNA
ctgcactccagcctgggcga

SEQ ID NO: 161866 - DNA, 20 bp, Homo sapiens
  source 1..20: mol_type = genomic DNA
tgcactccagcctgggcgac

SEQ ID NO: 161867 - DNA, 20 bp, Homo sapiens
  source 1..20: mol_type = genomic DNA
gcactccagcctgggcgaca

SEQ ID NO: 161868 - DNA, 20 bp, Homo sapiens
  source 1..20: mol_type = genomic DNA
cactccagcctgggcgacag

SEQ ID NO: 161869 - DNA, 20 bp, Homo sapiens
  source 1..20: mol_type = genomic DNA
actccagcctgggcgacaga

SEQ ID NO: 161870 - DNA, 20 bp, Homo sapiens
  source 1..20: mol_type = genomic DNA
ctccagcctgggcgacagag

SEQ ID NO: 161871 - DNA, 20 bp, Homo sapiens
  source 1..20: mol_type = genomic DNA
tccagcctgggcgacagagc

SEQ ID NO: 161872 - DNA, 20 bp, Homo sapiens
  source 1..20: mol_type = genomic DNA
ccagcctgggcgacagagcg

SEQ ID NO: 161873 - DNA, 20 bp, Homo sapiens
  source 1..20: mol_type = genomic DNA
cagcctgggcgacagagcga

SEQ ID NO: 161874 - DNA, 20 bp, Homo sapiens
  source 1..20: mol_type = genomic DNA
agcctgggcgacagagcgag

SEQ ID NO: 161875 - DNA, 20 bp, Homo sapiens
  source 1..20: mol_type = genomic DNA
gcctgggcgacagagcgaga

SEQ ID NO: 161876 - DNA, 20 bp, Homo sapiens
  source 1..20: mol_type = genomic DNA
cctgggcgacagagcgagac

SEQ ID NO: 161877 - DNA, 20 bp, Homo sapiens
  source 1..20: mol_type = genomic DNA
ctgggcgacagagcgagact

SEQ ID NO: 161878 - DNA, 20 bp, Homo sapiens
  source 1..20: mol_type = genomic DNA
tgggcgacagagcgagactc

SEQ ID NO: 161879 - DNA, 20 bp, Homo sapiens
  source 1..20: mol_type = genomic DNA
gggcgacagagcgagactcg

SEQ ID NO: 161880 - DNA, 20 bp, Homo sapiens
  source 1..20: mol_type = genomic DNA
ggcgacagagcgagactcgt

SEQ ID NO: 161881 - DNA, 20 bp, Homo sapiens
  source 1..20: mol_type = genomic DNA
gcgacagagcgagactcgtc

SEQ ID NO: 161882 - DNA, 20 bp, Homo sapiens
  source 1..20: mol_type = genomic DNA
cgacagagcgagactcgtct

SEQ ID NO: 161883 - DNA, 20 bp, Homo sapiens
  source 1..20: mol_type = genomic DNA
gacagagcgagactcgtctc

SEQ ID NO: 161884 - DNA, 20 bp, Homo sapiens
  source 1..20: mol_type = genomic DNA
acagagcgagactcgtctca

SEQ ID NO: 161885 - DNA, 20 bp, Homo sapiens
  source 1..20: mol_type = genomic DNA
cagagcgagactcgtctcaa

SEQ ID NO: 161886 - DNA, 20 bp, Homo sapiens
  source 1..20: mol_type = genomic DNA
agagcgagactcgtctcaaa

SEQ ID NO: 161887 - DNA, 20 bp, Homo sapiens
  source 1..20: mol_type = genomic DNA
gagcgagactcgtctcaaaa

SEQ ID NO: 161888 - DNA, 20 bp, Homo sapiens
  source 1..20: mol_type = genomic DNA
agcgagactcgtctcaaaaa

SEQ ID NO: 161889 - DNA, 20 bp, Homo sapiens
  source 1..20: mol_type = genomic DNA
gcgagactcgtctcaaaaaa

SEQ ID NO: 161890 - DNA, 20 bp, Homo sapiens
  source 1..20: mol_type = genomic DNA
cgagactcgtctcaaaaaaa

SEQ ID NO: 161891 - DNA, 20 bp, Homo sapiens
  source 1..20: mol_type = genomic DNA
gagactcgtctcaaaaaaaa

SEQ ID NO: 161892 - DNA, 20 bp, Homo sapiens
  source 1..20: mol_type = genomic DNA
agactcgtctcaaaaaaaaa

SEQ ID NO: 161893 - DNA, 20 bp, Homo sapiens
  source 1..20: mol_type = genomic DNA
gactcgtctcaaaaaaaaaa

SEQ ID NO: 161894 - DNA, 20 bp, Homo sapiens
  source 1..20: mol_type = genomic DNA
actcgtctcaaaaaaaaaaa

SEQ ID NO: 161895 - DNA, 20 bp, Homo sapiens
  source 1..20: mol_type = genomic DNA
ctcgtctcaaaaaaaaaaag

SEQ ID NO: 161896 - DNA, 20 bp, Homo sapiens
  source 1..20: mol_type = genomic DNA
tcgtctcaaaaaaaaaaaga

SEQ ID NO: 161897 - DNA, 20 bp, Homo sapiens
  source 1..20: mol_type = genomic DNA
cgtctcaaaaaaaaaaagaa

SEQ ID NO: 161898 - DNA, 20 bp, Homo sapiens
  source 1..20: mol_type = genomic DNA
gtctcaaaaaaaaaaagaaa

SEQ ID NO: 161899 - DNA, 20 bp, Homo sapiens
  source 1..20: mol_type = genomic DNA
tctcaaaaaaaaaaagaaaa

SEQ ID NO: 161900 - DNA, 20 bp, Homo sapiens
  source 1..20: mol_type = genomic DNA
ctcaaaaaaaaaaagaaaaa

SEQ ID NO: 161901 - DNA, 20 bp, Homo sapiens
  source 1..20: mol_type = genomic DNA
tcaaaaaaaaaaagaaaaaa

SEQ ID NO: 161902 - DNA, 20 bp, Homo sapiens
  source 1..20: mol_type = genomic DNA
caaaaaaaaaaagaaaaaaa

SEQ ID NO: 161903 - DNA, 20 bp, Homo sapiens
  source 1..20: mol_type = genomic DNA
aaaaaaaaaaagaaaaaaac

SEQ ID NO: 161904 - DNA, 20 bp, Homo sapiens
  source 1..20: mol_type = genomic DNA
aaaaaaaaaagaaaaaaact

SEQ ID NO: 161905 - DNA, 20 bp, Homo sapiens
  source 1..20: mol_type = genomic DNA
aaaaaaaaagaaaaaaactt

SEQ ID NO: 161906 - DNA, 20 bp, Homo sapiens
  source 1..20: mol_type = genomic DNA
aaaaaaaagaaaaaaactta

SEQ ID NO: 161907 - DNA, 20 bp, Homo sapiens
  source 1..20: mol_type = genomic DNA
aaaaaaagaaaaaaacttat

SEQ ID NO: 161908 - DNA, 20 bp, Homo sapiens
  source 1..20: mol_type = genomic DNA
aaaaaagaaaaaaacttatg

SEQ ID NO: 161909 - DNA, 20 bp, Homo sapiens
  source 1..20: mol_type = genomic DNA
aaaaagaaaaaaacttatga

SEQ ID NO: 161910 - DNA, 20 bp, Homo sapiens
  source 1..20: mol_type = genomic DNA
aaaagaaaaaaacttatgat

SEQ ID NO: 161911 - DNA, 20 bp, Homo sapiens
  source 1..20: mol_type = genomic DNA
aaagaaaaaaacttatgatg

SEQ ID NO: 161912 - DNA, 20 bp, Homo sapiens
  source 1..20: mol_type = genomic DNA
aagaaaaaaacttatgatgg

SEQ ID NO: 161913 - DNA, 20 bp, Homo sapiens
  source 1..20: mol_type = genomic DNA
agaaaaaaacttatgatgga

SEQ ID NO: 161914 - DNA, 20 bp, Homo sapiens
  source 1..20: mol_type = genomic DNA
gaaaaaaacttatgatggac

SEQ ID NO: 161915 - DNA, 20 bp, Homo sapiens
  source 1..20: mol_type = genomic DNA
aaaaaaacttatgatggaca

SEQ ID NO: 161916 - DNA, 20 bp, Homo sapiens
  source 1..20: mol_type = genomic DNA
aaaaaacttatgatggacac

SEQ ID NO: 161917 - DNA, 20 bp, Homo sapiens
  source 1..20: mol_type = genomic DNA
aaaaacttatgatggacact

SEQ ID NO: 161918 - DNA, 20 bp, Homo sapiens
  source 1..20: mol_type = genomic DNA
aaaacttatgatggacactt

SEQ ID NO: 161919 - DNA, 20 bp, Homo sapiens
  source 1..20: mol_type = genomic DNA
aaacttatgatggacactta

SEQ ID NO: 161920 - DNA, 20 bp, Homo sapiens
  source 1..20: mol_type = genomic DNA
aacttatgatggacacttaa

SEQ ID NO: 161921 - DNA, 20 bp, Homo sapiens
  source 1..20: mol_type = genomic DNA
acttatgatggacacttaaa

SEQ ID NO: 161922 - DNA, 20 bp, Homo sapiens
  source 1..20: mol_type = genomic DNA
cttatgatggacacttaaaa

SEQ ID NO: 161923 - DNA, 20 bp, Homo sapiens
  source 1..20: mol_type = genomic DNA
ttatgatggacacttaaaaa

SEQ ID NO: 161924 - DNA, 20 bp, Homo sapiens
  source 1..20: mol_type = genomic DNA
tatgatggacacttaaaaac

SEQ ID NO: 161925 - DNA, 20 bp, Homo sapiens
  source 1..20: mol_type = genomic DNA
atgatggacacttaaaaaca

SEQ ID NO: 161926 - DNA, 20 bp, Homo sapiens
  source 1..20: mol_type = genomic DNA
tgatggacacttaaaaacac

SEQ ID NO: 161927 - DNA, 20 bp, Homo sapiens
  source 1..20: mol_type = genomic DNA
gatggacacttaaaaacact

SEQ ID NO: 161928 - DNA, 20 bp, Homo sapiens
  source 1..20: mol_type = genomic DNA
atggacacttaaaaacactc

SEQ ID NO: 161929 - DNA, 20 bp, Homo sapiens
  source 1..20: mol_type = genomic DNA
tggacacttaaaaacactca

SEQ ID NO: 161930 - DNA, 20 bp, Homo sapiens
  source 1..20: mol_type = genomic DNA
ggacacttaaaaacactcac

SEQ ID NO: 161931 - DNA, 20 bp, Homo sapiens
  source 1..20: mol_type = genomic DNA
gacacttaaaaacactcact

SEQ ID NO: 161932 - DNA, 20 bp, Homo sapiens
  source 1..20: mol_type = genomic DNA
acacttaaaaacactcactg

SEQ ID NO: 161933 - DNA, 20 bp, Homo sapiens
  source 1..20: mol_type = genomic DNA
cacttaaaaacactcactga

SEQ ID NO: 161934 - DNA, 20 bp, Homo sapiens
  source 1..20: mol_type = genomic DNA
acttaaaaacactcactgag

SEQ ID NO: 161935 - DNA, 20 bp, Homo sapiens
  source 1..20: mol_type = genomic DNA
cttaaaaacactcactgagt

SEQ ID NO: 161936 - DNA, 20 bp, Homo sapiens
  source 1..20: mol_type = genomic DNA
ttaaaaacactcactgagtg

SEQ ID NO: 161937 - DNA, 20 bp, Homo sapiens
  source 1..20: mol_type = genomic DNA
taaaaacactcactgagtgg

SEQ ID NO: 161938 - DNA, 20 bp, Homo sapiens
  source 1..20: mol_type = genomic DNA
aaaaacactcactgagtggg

SEQ ID NO: 161939 - DNA, 20 bp, Homo sapiens
  source 1..20: mol_type = genomic DNA
aaaacactcactgagtgggg

SEQ ID NO: 161940 - DNA, 20 bp, Homo sapiens
  source 1..20: mol_type = genomic DNA
aaacactcactgagtgggga

SEQ ID NO: 161941 - DNA, 20 bp, Homo sapiens
  source 1..20: mol_type = genomic DNA
aacactcactgagtggggag

SEQ ID NO: 161942 - DNA, 20 bp, Homo sapiens
  source 1..20: mol_type = genomic DNA
acactcactgagtggggagt

SEQ ID NO: 161943 - DNA, 20 bp, Homo sapiens
  source 1..20: mol_type = genomic DNA
cactcactgagtggggagtg

SEQ ID NO: 161944 - DNA, 20 bp, Homo sapiens
  source 1..20: mol_type = genomic DNA
actcactgagtggggagtgg

SEQ ID NO: 161945 - DNA, 20 bp, Homo sapiens
  source 1..20: mol_type = genomic DNA
ctcactgagtggggagtgga

SEQ ID NO: 161946 - DNA, 20 bp, Homo sapiens
  source 1..20: mol_type = genomic DNA
tcactgagtggggagtggag

SEQ ID NO: 161947 - DNA, 20 bp, Homo sapiens
  source 1..20: mol_type = genomic DNA
cactgagtggggagtggaga

SEQ ID NO: 161948 - DNA, 20 bp, Homo sapiens
  source 1..20: mol_type = genomic DNA
actgagtggggagtggagag

SEQ ID NO: 161949 - DNA, 20 bp, Homo sapiens
  source 1..20: mol_type = genomic DNA
ctgagtggggagtggagagc

SEQ ID NO: 161950 - DNA, 20 bp, Homo sapiens
  source 1..20: mol_type = genomic DNA
tgagtggggagtggagagca

SEQ ID NO: 161951 - DNA, 20 bp, Homo sapiens
  source 1..20: mol_type = genomic DNA
gagtggggagtggagagcag

SEQ ID NO: 161952 - DNA, 20 bp, Homo sapiens
  source 1..20: mol_type = genomic DNA
agtggggagtggagagcagg

SEQ ID NO: 161953 - DNA, 20 bp, Homo sapiens
  source 1..20: mol_type = genomic DNA
gtggggagtggagagcaggg

SEQ ID NO: 161954 - DNA, 20 bp, Homo sapiens
  source 1..20: mol_type = genomic DNA
tggggagtggagagcagggg

SEQ ID NO: 161955 - DNA, 20 bp, Homo sapiens
  source 1..20: mol_type = genomic DNA
ggggagtggagagcaggggt

SEQ ID NO: 161956 - DNA, 20 bp, Homo sapiens
  source 1..20: mol_type = genomic DNA
gggagtggagagcaggggtc

SEQ ID NO: 161957 - DNA, 20 bp, Homo sapiens
  source 1..20: mol_type = genomic DNA
ggagtggagagcaggggtcc

SEQ ID NO: 161958 - DNA, 20 bp, Homo sapiens
  source 1..20: mol_type = genomic DNA
gagtggagagcaggggtccc

SEQ ID NO: 161959 - DNA, 20 bp, Homo sapiens
  source 1..20: mol_type = genomic DNA
agtggagagcaggggtccca

SEQ ID NO: 161960 - DNA, 20 bp, Homo sapiens
  source 1..20: mol_type = genomic DNA
gtggagagcaggggtcccag

SEQ ID NO: 161961 - DNA, 20 bp, Homo sapiens
  source 1..20: mol_type = genomic DNA
tggagagcaggggtcccagg

SEQ ID NO: 161962 - DNA, 20 bp, Homo sapiens
  source 1..20: mol_type = genomic DNA
ggagagcaggggtcccaggg

SEQ ID NO: 161963 - DNA, 20 bp, Homo sapiens
  source 1..20: mol_type = genomic DNA
gagagcaggggtcccagggt

SEQ ID NO: 161964 - DNA, 20 bp, Homo sapiens
  source 1..20: mol_type = genomic DNA
agagcaggggtcccagggta

SEQ ID NO: 161965 - DNA, 20 bp, Homo sapiens
  source 1..20: mol_type = genomic DNA
gagcaggggtcccagggtag

SEQ ID NO: 161966 - DNA, 20 bp, Homo sapiens
  source 1..20: mol_type = genomic DNA
agcaggggtcccagggtagc

SEQ ID NO: 161967 - DNA, 20 bp, Homo sapiens
  source 1..20: mol_type = genomic DNA
gcaggggtcccagggtagcc

SEQ ID NO: 161968 - DNA, 20 bp, Homo sapiens
  source 1..20: mol_type = genomic DNA
caggggtcccagggtagcct

SEQ ID NO: 161969 - DNA, 20 bp, Homo sapiens
  source 1..20: mol_type = genomic DNA
aggggtcccagggtagcctg

SEQ ID NO: 161970 - DNA, 20 bp, Homo sapiens
  source 1..20: mol_type = genomic DNA
ggggtcccagggtagcctgt

SEQ ID NO: 161971 - DNA, 20 bp, Homo sapiens
  source 1..20: mol_type = genomic DNA
gggtcccagggtagcctgtt

SEQ ID NO: 161972 - DNA, 20 bp, Homo sapiens
  source 1..20: mol_type = genomic DNA
ggtcccagggtagcctgttg

SEQ ID NO: 161973 - DNA, 20 bp, Homo sapiens
  source 1..20: mol_type = genomic DNA
gtcccagggtagcctgttgg

SEQ ID NO: 161974 - DNA, 20 bp, Homo sapiens
  source 1..20: mol_type = genomic DNA
tcccagggtagcctgttgga

SEQ ID NO: 161975 - DNA, 20 bp, Homo sapiens
  source 1..20: mol_type = genomic DNA
cccagggtagcctgttggac

SEQ ID NO: 161976 - DNA, 20 bp, Homo sapiens
  source 1..20: mol_type = genomic DNA
ccagggtagcctgttggaca

SEQ ID NO: 161977 - DNA, 20 bp, Homo sapiens
  source 1..20: mol_type = genomic DNA
cagggtagcctgttggacat

SEQ ID NO: 161978 - DNA, 20 bp, Homo sapiens
  source 1..20: mol_type = genomic DNA
agggtagcctgttggacatt

SEQ ID NO: 161979 - DNA, 20 bp, Homo sapiens
  source 1..20: mol_type = genomic DNA
gggtagcctgttggacattt

SEQ ID NO: 161980 - DNA, 20 bp, Homo sapiens
  source 1..20: mol_type = genomic DNA
ggtagcctgttggacatttc

SEQ ID NO: 161981 - DNA, 20 bp, Homo sapiens
  source 1..20: mol_type = genomic DNA
gtagcctgttggacatttcc

SEQ ID NO: 161982 - DNA, 20 bp, Homo sapiens
  source 1..20: mol_type = genomic DNA
tagcctgttggacatttcca

SEQ ID NO: 161983 - DNA, 20 bp, Homo sapiens
  source 1..20: mol_type = genomic DNA
agcctgttggacatttccag

SEQ ID NO: 161984 - DNA, 20 bp, Homo sapiens
  source 1..20: mol_type = genomic DNA
gcctgttggacatttccagg

SEQ ID NO: 161985 - DNA, 20 bp, Homo sapiens
  source 1..20: mol_type = genomic DNA
cctgttggacatttccaggg

SEQ ID NO: 161986 - DNA, 20 bp, Homo sapiens
  source 1..20: mol_type = genomic DNA
ctgttggacatttccagggc

SEQ ID NO: 161987 - DNA, 20 bp, Homo sapiens
  source 1..20: mol_type = genomic DNA
tgttggacatttccagggcg

SEQ ID NO: 161988 - DNA, 20 bp, Homo sapiens
  source 1..20: mol_type = genomic DNA
gttggacatttccagggcga

SEQ ID NO: 161989 - DNA, 20 bp, Homo sapiens
  source 1..20: mol_type = genomic DNA
ttggacatttccagggcgac

SEQ ID NO: 161990 - DNA, 20 bp, Homo sapiens
  source 1..20: mol_type = genomic DNA
tggacatttccagggcgact

SEQ ID NO: 161991 - DNA, 20 bp, Homo sapiens
  source 1..20: mol_type = genomic DNA
ggacatttccagggcgactt

SEQ ID NO: 161992 - DNA, 20 bp, Homo sapiens
  source 1..20: mol_type = genomic DNA
gacatttccagggcgacttt

SEQ ID NO: 161993 - DNA, 20 bp, Homo sapiens
  source 1..20: mol_type = genomic DNA
acatttccagggcgactttt

SEQ ID NO: 161994 - DNA, 20 bp, Homo sapiens
  source 1..20: mol_type = genomic DNA
catttccagggcgacttttt

SEQ ID NO: 161995 - DNA, 20 bp, Homo sapiens
  source 1..20: mol_type = genomic DNA
atttccagggcgactttttc

SEQ ID NO: 161996 - DNA, 20 bp, Homo sapiens
  source 1..20: mol_type = genomic DNA
tttccagggcgactttttct

SEQ ID NO: 161997 - DNA, 20 bp, Homo sapiens
  source 1..20: mol_type = genomic DNA
ttccagggcgactttttctt

SEQ ID NO: 161998 - DNA, 20 bp, Homo sapiens
  source 1..20: mol_type = genomic DNA
tccagggcgactttttcttt

SEQ ID NO: 161999 - DNA, 20 bp, Homo sapiens
  source 1..20: mol_type = genomic DNA
ccagggcgactttttctttt

SEQ ID NO: 162000 - DNA, 20 bp, Homo sapiens
  source 1..20: mol_type = genomic DNA
cagggcgactttttcttttt

SEQ ID NO: 162001 - DNA, 20 bp, Homo sapiens
  source 1..20: mol_type = genomic DNA
agggcgactttttctttttt

SEQ ID NO: 162002 - DNA, 20 bp, Homo sapiens
  source 1..20: mol_type = genomic DNA
gggcgactttttcttttttt

SEQ ID NO: 162003 - DNA, 20 bp, Homo sapiens
  source 1..20: mol_type = genomic DNA
ggcgactttttctttttttt

SEQ ID NO: 162004 - DNA, 20 bp, Homo sapiens
  source 1..20: mol_type = genomic DNA
gcgactttttcttttttttt

SEQ ID NO: 162005 - DNA, 20 bp, Homo sapiens
  source 1..20: mol_type = genomic DNA
cgactttttctttttttttt

SEQ ID NO: 162006 - DNA, 20 bp, Homo sapiens
  source 1..20: mol_type = genomic DNA
gactttttcttttttttttt

SEQ ID NO: 162007 - DNA, 20 bp, Homo sapiens
  source 1..20: mol_type = genomic DNA
actttttctttttttttttt

SEQ ID NO: 162008 - DNA, 20 bp, Homo sapiens
  source 1..20: mol_type = genomic DNA
ctttttcttttttttttttt

SEQ ID NO: 162009 - DNA, 20 bp, Homo sapiens
  source 1..20: mol_type = genomic DNA
tttttcttttttttttttta

SEQ ID NO: 162010 - DNA, 20 bp, Homo sapiens
  source 1..20: mol_type = genomic DNA
ttttctttttttttttttaa

SEQ ID NO: 162011 - DNA, 20 bp, Homo sapiens
  source 1..20: mol_type = genomic DNA
tttctttttttttttttaaa

SEQ ID NO: 162012 - DNA, 20 bp, Homo sapiens
  source 1..20: mol_type = genomic DNA
ttctttttttttttttaaag

SEQ ID NO: 162013 - DNA, 20 bp, Homo sapiens
  source 1..20: mol_type = genomic DNA
tctttttttttttttaaagt

SEQ ID NO: 162014 - DNA, 20 bp, Homo sapiens
  source 1..20: mol_type = genomic DNA
ctttttttttttttaaagtc

SEQ ID NO: 162015 - DNA, 20 bp, Homo sapiens
  source 1..20: mol_type = genomic DNA
tttttttttttttaaagtca

SEQ ID NO: 162016 - DNA, 20 bp, Homo sapiens
  source 1..20: mol_type = genomic DNA
ttttttttttttaaagtcaa

SEQ ID NO: 162017 - DNA, 20 bp, Homo sapiens
  source 1..20: mol_type = genomic DNA
tttttttttttaaagtcaag

SEQ ID NO: 162018 - DNA, 20 bp, Homo sapiens
  source 1..20: mol_type = genomic DNA
ttttttttttaaagtcaagt

SEQ ID NO: 162019 - DNA, 20 bp, Homo sapiens
  source 1..20: mol_type = genomic DNA
tttttttttaaagtcaagtg

SEQ ID NO: 162020 - DNA, 20 bp, Homo sapiens
  source 1..20: mol_type = genomic DNA
ttttttttaaagtcaagtga

SEQ ID NO: 162021 - DNA, 20 bp, Homo sapiens
  source 1..20: mol_type = genomic DNA
tttttttaaagtcaagtgag

SEQ ID NO: 162022 - DNA, 20 bp, Homo sapiens
  source 1..20: mol_type = genomic DNA
ttttttaaagtcaagtgagt

SEQ ID NO: 162023 - DNA, 20 bp, Homo sapiens
  source 1..20: mol_type = genomic DNA
tttttaaagtcaagtgagta

SEQ ID NO: 162024 - DNA, 20 bp, Homo sapiens
  source 1..20: mol_type = genomic DNA
ttttaaagtcaagtgagtat

SEQ ID NO: 162025 - DNA, 20 bp, Homo sapiens
  source 1..20: mol_type = genomic DNA
tttaaagtcaagtgagtatg

SEQ ID NO: 162026 - DNA, 20 bp, Homo sapiens
  source 1..20: mol_type = genomic DNA
ttaaagtcaagtgagtatgc

SEQ ID NO: 162027 - DNA, 20 bp, Homo sapiens
  source 1..20: mol_type = genomic DNA
taaagtcaagtgagtatgcc

SEQ ID NO: 162028 - DNA, 20 bp, Homo sapiens
  source 1..20: mol_type = genomic DNA
aaagtcaagtgagtatgcca

SEQ ID NO: 162029 - DNA, 20 bp, Homo sapiens
  source 1..20: mol_type = genomic DNA
aagtcaagtgagtatgccat

SEQ ID NO: 162030 - DNA, 20 bp, Homo sapiens
  source 1..20: mol_type = genomic DNA
agtcaagtgagtatgccata

SEQ ID NO: 162031 - DNA, 20 bp, Homo sapiens
  source 1..20: mol_type = genomic DNA
gtcaagtgagtatgccatat

SEQ ID NO: 162032 - DNA, 20 bp, Homo sapiens
  source 1..20: mol_type = genomic DNA
tcaagtgagtatgccatatg

SEQ ID NO: 162033 - DNA, 20 bp, Homo sapiens
  source 1..20: mol_type = genomic DNA
caagtgagtatgccatatgg

SEQ ID NO: 162034 - DNA, 20 bp, Homo sapiens
  source 1..20: mol_type = genomic DNA
aagtgagtatgccatatgga

SEQ ID NO: 162035 - DNA, 20 bp, Homo sapiens
  source 1..20: mol_type = genomic DNA
agtgagtatgccatatggaa

SEQ ID NO: 162036 - DNA, 20 bp, Homo sapiens
  source 1..20: mol_type = genomic DNA
gtgagtatgccatatggaaa

SEQ ID NO: 162037 - DNA, 20 bp, Homo sapiens
  source 1..20: mol_type = genomic DNA
tgagtatgccatatggaaaa

SEQ ID NO: 162038 - DNA, 20 bp, Homo sapiens
  source 1..20: mol_type = genomic DNA
gagtatgccatatggaaaag

SEQ ID NO: 162039 - DNA, 20 bp, Homo sapiens
  source 1..20: mol_type = genomic DNA
agtatgccatatggaaaagg

SEQ ID NO: 162040 - DNA, 20 bp, Homo sapiens
  source 1..20: mol_type = genomic DNA
gtatgccatatggaaaaggg

SEQ ID NO: 162041 - DNA, 20 bp, Homo sapiens
  source 1..20: mol_type = genomic DNA
tatgccatatggaaaagggt

SEQ ID NO: 162042 - DNA, 20 bp, Homo sapiens
  source 1..20: mol_type = genomic DNA
atgccatatggaaaagggtg

SEQ ID NO: 162043 - DNA, 20 bp, Homo sapiens
  source 1..20: mol_type = genomic DNA
tgccatatggaaaagggtgt

SEQ ID NO: 162044 - DNA, 20 bp, Homo sapiens
  source 1..20: mol_type = genomic DNA
gccatatggaaaagggtgtg

SEQ ID NO: 162045 - DNA, 20 bp, Homo sapiens
  source 1..20: mol_type = genomic DNA
ccatatggaaaagggtgtgc

SEQ ID NO: 162046 - DNA, 20 bp, Homo sapiens
  source 1..20: mol_type = genomic DNA
catatggaaaagggtgtgcg

SEQ ID NO: 162047 - DNA, 20 bp, Homo sapiens
  source 1..20: mol_type = genomic DNA
atatggaaaagggtgtgcgt

SEQ ID NO: 162048 - DNA, 20 bp, Homo sapiens
  source 1..20: mol_type = genomic DNA
tatggaaaagggtgtgcgtg

SEQ ID NO: 162049 - DNA, 20 bp, Homo sapiens
  source 1..20: mol_type = genomic DNA
atggaaaagggtgtgcgtgg

SEQ ID NO: 162050 - DNA, 20 bp, Homo sapiens
  source 1..20: mol_type = genomic DNA
tggaaaagggtgtgcgtgga

SEQ ID NO: 162051 - DNA, 20 bp, Homo sapiens
  source 1..20: mol_type = genomic DNA
ggaaaagggtgtgcgtggag

SEQ ID NO: 162052 - DNA, 20 bp, Homo sapiens
  source 1..20: mol_type = genomic DNA
gaaaagggtgtgcgtggaga

SEQ ID NO: 162053 - DNA, 20 bp, Homo sapiens
  source 1..20: mol_type = genomic DNA
aaaagggtgtgcgtggagaa

SEQ ID NO: 162054 - DNA, 20 bp, Homo sapiens
  source 1..20: mol_type = genomic DNA
aaagggtgtgcgtggagaaa

SEQ ID NO: 162055 - DNA, 20 bp, Homo sapiens
  source 1..20: mol_type = genomic DNA
aagggtgtgcgtggagaaaa

SEQ ID NO: 162056 - DNA, 20 bp, Homo sapiens
  source 1..20: mol_type = genomic DNA
agggtgtgcgtggagaaaaa

SEQ ID NO: 162057 - DNA, 20 bp, Homo sapiens
  source 1..20: mol_type = genomic DNA
gggtgtgcgtggagaaaaag

SEQ ID NO: 162058 - DNA, 20 bp, Homo sapiens
  source 1..20: mol_type = genomic DNA
ggtgtgcgtggagaaaaagc

SEQ ID NO: 162059 - DNA, 20 bp, Homo sapiens
  source 1..20: mol_type = genomic DNA
gtgtgcgtggagaaaaagca

SEQ ID NO: 162060 - DNA, 20 bp, Homo sapiens
  source 1..20: mol_type = genomic DNA
tgtgcgtggagaaaaagcaa

SEQ ID NO: 162061 - DNA, 20 bp, Homo sapiens
  source 1..20: mol_type = genomic DNA
gtgcgtggagaaaaagcaag

SEQ ID NO: 162062 - DNA, 20 bp, Homo sapiens
  source 1..20: mol_type = genomic DNA
tgcgtggagaaaaagcaagg

SEQ ID NO: 162063 - DNA, 20 bp, Homo sapiens
  source 1..20: mol_type = genomic DNA
gcgtggagaaaaagcaaggg

SEQ ID NO: 162064 - DNA, 20 bp, Homo sapiens
  source 1..20: mol_type = genomic DNA
cgtggagaaaaagcaagggg

SEQ ID NO: 162065 - DNA, 20 bp, Homo sapiens
  source 1..20: mol_type = genomic DNA
gtggagaaaaagcaaggggc

SEQ ID NO: 162066 - DNA, 20 bp, Homo sapiens
  source 1..20: mol_type = genomic DNA
tggagaaaaagcaaggggct

SEQ ID NO: 162067 - DNA, 20 bp, Homo sapiens
  source 1..20: mol_type = genomic DNA
ggagaaaaagcaaggggctc

SEQ ID NO: 162068 - DNA, 20 bp, Homo sapiens
  source 1..20: mol_type = genomic DNA
gagaaaaagcaaggggctcc

SEQ ID NO: 162069 - DNA, 20 bp, Homo sapiens
  source 1..20: mol_type = genomic DNA
agaaaaagcaaggggctcca

SEQ ID NO: 162070 - DNA, 20 bp, Homo sapiens
  source 1..20: mol_type = genomic DNA
gaaaaagcaaggggctccag

SEQ ID NO: 162071 - DNA, 20 bp, Homo sapiens
  source 1..20: mol_type = genomic DNA
aaaaagcaaggggctccaga

SEQ ID NO: 162072 - DNA, 20 bp, Homo sapiens
  source 1..20: mol_type = genomic DNA
aaaagcaaggggctccagag

SEQ ID NO: 162073 - DNA, 20 bp, Homo sapiens
  source 1..20: mol_type = genomic DNA
aaagcaaggggctccagagt

SEQ ID NO: 162074 - DNA, 20 bp, Homo sapiens
  source 1..20: mol_type = genomic DNA
aagcaaggggctccagagtg

SEQ ID NO: 162075 - DNA, 20 bp, Homo sapiens
  source 1..20: mol_type = genomic DNA
agcaaggggctccagagtgt

SEQ ID NO: 162076 - DNA, 20 bp, Homo sapiens
  source 1..20: mol_type = genomic DNA
gcaaggggctccagagtgta

SEQ ID NO: 162077 - DNA, 20 bp, Homo sapiens
  source 1..20: mol_type = genomic DNA
caaggggctccagagtgtag

SEQ ID NO: 162078 - DNA, 20 bp, Homo sapiens
  source 1..20: mol_type = genomic DNA
aaggggctccagagtgtagg

SEQ ID NO: 162079 - DNA, 20 bp, Homo sapiens
  source 1..20: mol_type = genomic DNA
aggggctccagagtgtagga

SEQ ID NO: 162080 - DNA, 20 bp, Homo sapiens
  source 1..20: mol_type = genomic DNA
ggggctccagagtgtaggat

SEQ ID NO: 162081 - DNA, 20 bp, Homo sapiens
  source 1..20: mol_type = genomic DNA
gggctccagagtgtaggatg

SEQ ID NO: 162082 - DNA, 20 bp, Homo sapiens
  source 1..20: mol_type = genomic DNA
ggctccagagtgtaggatga

SEQ ID NO: 162083 - DNA, 20 bp, Homo sapiens
  source 1..20: mol_type = genomic DNA
gctccagagtgtaggatgag

SEQ ID NO: 162084 - DNA, 20 bp, Homo sapiens
  source 1..20: mol_type = genomic DNA
ctccagagtgtaggatgaga

SEQ ID NO: 162085 - DNA, 20 bp, Homo sapiens
  source 1..20: mol_type = genomic DNA
tccagagtgtaggatgagac

SEQ ID NO: 162086 - DNA, 20 bp, Homo sapiens
  source 1..20: mol_type = genomic DNA
ccagagtgtaggatgagaca

SEQ ID NO: 162087 - DNA, 20 bp, Homo sapiens
  source 1..20: mol_type = genomic DNA
cagagtgtaggatgagacat

SEQ ID NO: 162088 - DNA, 20 bp, Homo sapiens
  source 1..20: mol_type = genomic DNA
agagtgtaggatgagacata

SEQ ID NO: 162089 - DNA, 20 bp, Homo sapiens
  source 1..20: mol_type = genomic DNA
gagtgtaggatgagacatac

SEQ ID NO: 162090 - DNA, 20 bp, Homo sapiens
  source 1..20: mol_type = genomic DNA
agtgtaggatgagacataca

SEQ ID NO: 162091 - DNA, 20 bp, Homo sapiens
  source 1..20: mol_type = genomic DNA
gtgtaggatgagacatacac

SEQ ID NO: 162092 - DNA, 20 bp, Homo sapiens
  source 1..20: mol_type = genomic DNA
tgtaggatgagacatacacc

SEQ ID NO: 162093 - DNA, 20 bp, Homo sapiens
  source 1..20: mol_type = genomic DNA
gtaggatgagacatacacct

SEQ ID NO: 162094 - DNA, 20 bp, Homo sapiens
  source 1..20: mol_type = genomic DNA
taggatgagacatacacctt

SEQ ID NO: 162095 - DNA, 20 bp, Homo sapiens
  source 1..20: mol_type = genomic DNA
aggatgagacatacaccttt

SEQ ID NO: 162096 - DNA, 20 bp, Homo sapiens
  source 1..20: mol_type = genomic DNA
ggatgagacatacacctttt

SEQ ID NO: 162097 - DNA, 20 bp, Homo sapiens
  source 1..20: mol_type = genomic DNA
gatgagacatacaccttttg

SEQ ID NO: 162098 - DNA, 20 bp, Homo sapiens
  source 1..20: mol_type = genomic DNA
atgagacatacaccttttgg

SEQ ID NO: 162099 - DNA, 20 bp, Homo sapiens
  source 1..20: mol_type = genomic DNA
tgagacatacaccttttggg

SEQ ID NO: 162100 - DNA, 20 bp, Homo sapiens
  source 1..20: mol_type = genomic DNA
gagacatacaccttttgggt

SEQ ID NO: 162101 - DNA, 20 bp, Homo sapiens
  source 1..20: mol_type = genomic DNA
agacatacaccttttgggtt

SEQ ID NO: 162102 - DNA, 20 bp, Homo sapiens
  source 1..20: mol_type = genomic DNA
gacatacaccttttgggtta

SEQ ID NO: 162103 - DNA, 20 bp, Homo sapiens
  source 1..20: mol_type = genomic DNA
acatacaccttttgggttaa

SEQ ID NO: 162104 - DNA, 20 bp, Homo sapiens
  source 1..20: mol_type = genomic DNA
catacaccttttgggttaaa

SEQ ID NO: 162105 - DNA, 20 bp, Homo sapiens
  source 1..20: mol_type = genomic DNA
atacaccttttgggttaaaa

SEQ ID NO: 162106 - DNA, 20 bp, Homo sapiens
  source 1..20: mol_type = genomic DNA
tacaccttttgggttaaaaa

SEQ ID NO: 162107 - DNA, 20 bp, Homo sapiens
  source 1..20: mol_type = genomic DNA
acaccttttgggttaaaaag

SEQ ID NO: 162108 - DNA, 20 bp, Homo sapiens
  source 1..20: mol_type = genomic DNA
caccttttgggttaaaaagg

SEQ ID NO: 162109 - DNA, 20 bp, Homo sapiens
  source 1..20: mol_type = genomic DNA
accttttgggttaaaaaggc

SEQ ID NO: 162110 - DNA, 20 bp, Homo sapiens
  source 1..20: mol_type = genomic DNA
ccttttgggttaaaaaggct

SEQ ID NO: 162111 - DNA, 20 bp, Homo sapiens
  source 1..20: mol_type = genomic DNA
cttttgggttaaaaaggctg

SEQ ID NO: 162112 - DNA, 20 bp, Homo sapiens
  source 1..20: mol_type = genomic DNA
ttttgggttaaaaaggctga

SEQ ID NO: 162113 - DNA, 20 bp, Homo sapiens
  source 1..20: mol_type = genomic DNA
tttgggttaaaaaggctgag

SEQ ID NO: 162114 - DNA, 20 bp, Homo sapiens
  source 1..20: mol_type = genomic DNA
ttgggttaaaaaggctgagg

SEQ ID NO: 162115 - DNA, 20 bp, Homo sapiens
  source 1..20: mol_type = genomic DNA
tgggttaaaaaggctgaggc

SEQ ID NO: 162116 - DNA, 20 bp, Homo sapiens
  source 1..20: mol_type = genomic DNA
gggttaaaaaggctgaggca

SEQ ID NO: 162117 - DNA, 20 bp, Homo sapiens
  source 1..20: mol_type = genomic DNA
ggttaaaaaggctgaggcag

SEQ ID NO: 162118 - DNA, 20 bp, Homo sapiens
  source 1..20: mol_type = genomic DNA
gttaaaaaggctgaggcagg

SEQ ID NO: 162119 - DNA, 20 bp, Homo sapiens
  source 1..20: mol_type = genomic DNA
ttaaaaaggctgaggcagga

SEQ ID NO: 162120 - DNA, 20 bp, Homo sapiens
  source 1..20: mol_type = genomic DNA
taaaaaggctgaggcaggag

SEQ ID NO: 162121 - DNA, 20 bp, Homo sapiens
  source 1..20: mol_type = genomic DNA
aaaaaggctgaggcaggaga

SEQ ID NO: 162122 - DNA, 20 bp, Homo sapiens
  source 1..20: mol_type = genomic DNA
aaaaggctgaggcaggagaa

SEQ ID NO: 162123 - DNA, 20 bp, Homo sapiens
  source 1..20: mol_type = genomic DNA
aaaggctgaggcaggagaat

SEQ ID NO: 162124 - DNA, 20 bp, Homo sapiens
  source 1..20: mol_type = genomic DNA
aaggctgaggcaggagaatg

SEQ ID NO: 162125 - DNA, 20 bp, Homo sapiens
  source 1..20: mol_type = genomic DNA
aggctgaggcaggagaatgg

SEQ ID NO: 162126 - DNA, 20 bp, Homo sapiens
  source 1..20: mol_type = genomic DNA
ggctgaggcaggagaatggc

SEQ ID NO: 162127 - DNA, 20 bp, Homo sapiens
  source 1..20: mol_type = genomic DNA
gctgaggcaggagaatggcg

SEQ ID NO: 162128 - DNA, 20 bp, Homo sapiens
  source 1..20: mol_type = genomic DNA
ctgaggcaggagaatggcgt

SEQ ID NO: 162129 - DNA, 20 bp, Homo sapiens
  source 1..20: mol_type = genomic DNA
tgaggcaggagaatggcgtg

SEQ ID NO: 162130 - DNA, 20 bp, Homo sapiens
  source 1..20: mol_type = genomic DNA
gaggcaggagaatggcgtga

SEQ ID NO: 162131 - DNA, 20 bp, Homo sapiens
  source 1..20: mol_type = genomic DNA
aggcaggagaatggcgtgaa

SEQ ID NO: 162132 - DNA, 20 bp, Homo sapiens
  source 1..20: mol_type = genomic DNA
ggcaggagaatggcgtgaac

SEQ ID NO: 162133 - DNA, 20 bp, Homo sapiens
  source 1..20: mol_type = genomic DNA
gcaggagaatggcgtgaacc

SEQ ID NO: 162134 - DNA, 20 bp, Homo sapiens
  source 1..20: mol_type = genomic DNA
caggagaatggcgtgaaccc

SEQ ID NO: 162135 - DNA, 20 bp, Homo sapiens
  source 1..20: mol_type = genomic DNA
aggagaatggcgtgaacccg

SEQ ID NO: 162136 - DNA, 20 bp, Homo sapiens
  source 1..20: mol_type = genomic DNA
ggagaatggcgtgaacccgg

SEQ ID NO: 162137 - DNA, 20 bp, Homo sapiens
  source 1..20: mol_type = genomic DNA
gagaatggcgtgaacccggg

SEQ ID NO: 162138 - DNA, 20 bp, Homo sapiens
  source 1..20: mol_type = genomic DNA
agaatggcgtgaacccggga

SEQ ID NO: 162139 - DNA, 20 bp, Homo sapiens
  source 1..20: mol_type = genomic DNA
gaatggcgtgaacccgggag

SEQ ID NO: 162140 - DNA, 20 bp, Homo sapiens
  source 1..20: mol_type = genomic DNA
aatggcgtgaacccgggagg

SEQ ID NO: 162141 - DNA, 20 bp, Homo sapiens
  source 1..20: mol_type = genomic DNA
atggcgtgaacccgggaggc

SEQ ID NO: 162142 - DNA, 20 bp, Homo sapiens
  source 1..20: mol_type = genomic DNA
tggcgtgaacccgggaggcg

SEQ ID NO: 162143 - DNA, 20 bp, Homo sapiens
  source 1..20: mol_type = genomic DNA
ggcgtgaacccgggaggcgg

SEQ ID NO: 162144 - DNA, 20 bp, Homo sapiens
  source 1..20: mol_type = genomic DNA
gcgtgaacccgggaggcgga

SEQ ID NO: 162145 - DNA, 20 bp, Homo sapiens
  source 1..20: mol_type = genomic DNA
cgtgaacccgggaggcggag

SEQ ID NO: 162146 - DNA, 20 bp, Homo sapiens
  source 1..20: mol_type = genomic DNA
gtgaacccgggaggcggagc

SEQ ID NO: 162147 - DNA, 20 bp, Homo sapiens
  source 1..20: mol_type = genomic DNA
tgaacccgggaggcggagct

SEQ ID NO: 162148 - DNA, 20 bp, Homo sapiens
  source 1..20: mol_type = genomic DNA
gaacccgggaggcggagctt

SEQ ID NO: 162149 - DNA, 20 bp, Homo sapiens
  source 1..20: mol_type = genomic DNA
aacccgggaggcggagcttg

SEQ ID NO: 162150 - DNA, 20 bp, Homo sapiens
  source 1..20: mol_type = genomic DNA
acccgggaggcggagcttgc

SEQ ID NO: 162151 - DNA, 20 bp, Homo sapiens
  source 1..20: mol_type = genomic DNA
cccgggaggcggagcttgca

SEQ ID NO: 162152 - DNA, 20 bp, Homo sapiens
  source 1..20: mol_type = genomic DNA
ccgggaggcggagcttgcag

SEQ ID NO: 162153 - DNA, 20 bp, Homo sapiens
  source 1..20: mol_type = genomic DNA
cgggaggcggagcttgcagt

SEQ ID NO: 162154 - DNA, 20 bp, Homo sapiens
  source 1..20: mol_type = genomic DNA
gggaggcggagcttgcagtg

SEQ ID NO: 162155 - DNA, 20 bp, Homo sapiens
  source 1..20: mol_type = genomic DNA
ggaggcggagcttgcagtga

SEQ ID NO: 162156 - DNA, 20 bp, Homo sapiens
  source 1..20: mol_type = genomic DNA
gaggcggagcttgcagtgag

SEQ ID NO: 162157 - DNA, 20 bp, Homo sapiens
  source 1..20: mol_type = genomic DNA
aggcggagcttgcagtgagc

SEQ ID NO: 162158 - DNA, 20 bp, Homo sapiens
  source 1..20: mol_type = genomic DNA
ggcggagcttgcagtgagct

SEQ ID NO: 162159 - DNA, 20 bp, Homo sapiens
  source 1..20: mol_type = genomic DNA
gcggagcttgcagtgagctg

SEQ ID NO: 162160 - DNA, 20 bp, Homo sapiens
  source 1..20: mol_type = genomic DNA
cggagcttgcagtgagctga

SEQ ID NO: 162161 - DNA, 20 bp, Homo sapiens
  source 1..20: mol_type = genomic DNA
ggagcttgcagtgagctgag

SEQ ID NO: 162162 - DNA, 20 bp, Homo sapiens
  source 1..20: mol_type = genomic DNA
gagcttgcagtgagctgaga

SEQ ID NO: 162163 - DNA, 20 bp, Homo sapiens
  source 1..20: mol_type = genomic DNA
agcttgcagtgagctgagat

SEQ ID NO: 162164 - DNA, 20 bp, Homo sapiens
  source 1..20: mol_type = genomic DNA
gcttgcagtgagctgagatc

SEQ ID NO: 162165 - DNA, 20 bp, Homo sapiens
  source 1..20: mol_type = genomic DNA
cttgcagtgagctgagatca

SEQ ID NO: 162166 - DNA, 20 bp, Homo sapiens
  source 1..20: mol_type = genomic DNA
ttgcagtgagctgagatcat

SEQ ID NO: 162167 - DNA, 20 bp, Homo sapiens
  source 1..20: mol_type = genomic DNA
tgcagtgagctgagatcatg

SEQ ID NO: 162168 - DNA, 20 bp, Homo sapiens
  source 1..20: mol_type = genomic DNA
gcagtgagctgagatcatgc

SEQ ID NO: 162169 - DNA, 20 bp, Homo sapiens
  source 1..20: mol_type = genomic DNA
cagtgagctgagatcatgcc

SEQ ID NO: 162170 - DNA, 20 bp, Homo sapiens
  source 1..20: mol_type = genomic DNA
agtgagctgagatcatgcca

SEQ ID NO: 162171 - DNA, 20 bp, Homo sapiens
  source 1..20: mol_type = genomic DNA
gtgagctgagatcatgccac

SEQ ID NO: 162172 - DNA, 20 bp, Homo sapiens
  source 1..20: mol_type = genomic DNA
tgagctgagatcatgccact

SEQ ID NO: 162173 - DNA, 20 bp, Homo sapiens
  source 1..20: mol_type = genomic DNA
gagctgagatcatgccactg

SEQ ID NO: 162174 - DNA, 20 bp, Homo sapiens
  source 1..20: mol_type = genomic DNA
agctgagatcatgccactgc

SEQ ID NO: 162175 - DNA, 20 bp, Homo sapiens
  source 1..20: mol_type = genomic DNA
gctgagatcatgccactgca

SEQ ID NO: 162176 - DNA, 20 bp, Homo sapiens
  source 1..20: mol_type = genomic DNA
ctgagatcatgccactgcac

SEQ ID NO: 162177 - DNA, 20 bp, Homo sapiens
  source 1..20: mol_type = genomic DNA
tgagatcatgccactgcact

SEQ ID NO: 162178 - DNA, 20 bp, Homo sapiens
  source 1..20: mol_type = genomic DNA
gagatcatgccactgcactc

SEQ ID NO: 162179 - DNA, 20 bp, Homo sapiens
  source 1..20: mol_type = genomic DNA
agatcatgccactgcactcc

SEQ ID NO: 162180 - DNA, 20 bp, Homo sapiens
  source 1..20: mol_type = genomic DNA
gatcatgccactgcactcca

SEQ ID NO: 162181 - DNA, 20 bp, Homo sapiens
  source 1..20: mol_type = genomic DNA
atcatgccactgcactccag

SEQ ID NO: 162182 - DNA, 20 bp, Homo sapiens
  source 1..20: mol_type = genomic DNA
tcatgccactgcactccagc

SEQ ID NO: 162183 - DNA, 20 bp, Homo sapiens
  source 1..20: mol_type = genomic DNA
catgccactgcactccagcc

SEQ ID NO: 162184 - DNA, 20 bp, Homo sapiens
  source 1..20: mol_type = genomic DNA
atgccactgcactccagcct

SEQ ID NO: 162185 - DNA, 20 bp, Homo sapiens
  source 1..20: mol_type = genomic DNA
tgccactgcactccagcctg

SEQ ID NO: 162186 - DNA, 20 bp, Homo sapiens
  source 1..20: mol_type = genomic DNA
gccactgcactccagcctgg

SEQ ID NO: 162187 - DNA, 20 bp, Homo sapiens
  source 1..20: mol_type = genomic DNA
ccactgcactccagcctggg

SEQ ID NO: 162188 - DNA, 20 bp, Homo sapiens
  source 1..20: mol_type = genomic DNA
cactgcactccagcctgggc

SEQ ID NO: 162189 - DNA, 20 bp, Homo sapiens
  source 1..20: mol_type = genomic DNA
actgcactccagcctgggcg

SEQ ID NO: 162190 - DNA, 20 bp, Homo sapiens
  source 1..20: mol_type = genomic DNA
ctgcactccagcctgggcga

SEQ ID NO: 162191 - DNA, 20 bp, Homo sapiens
  source 1..20: mol_type = genomic DNA
tgcactccagcctgggcgac

SEQ ID NO: 162192 - DNA, 20 bp, Homo sapiens
  source 1..20: mol_type = genomic DNA
gcactccagcctgggcgaca

SEQ ID NO: 162193 - DNA, 20 bp, Homo sapiens
  source 1..20: mol_type = genomic DNA
cactccagcctgggcgacag

SEQ ID NO: 162194 - DNA, 20 bp, Homo sapiens
  source 1..20: mol_type = genomic DNA
actccagcctgggcgacaga

SEQ ID NO: 162195 - DNA, 20 bp, Homo sapiens
  source 1..20: mol_type = genomic DNA
ctccagcctgggcgacagag

SEQ ID NO: 162196 - DNA, 20 bp, Homo sapiens
  source 1..20: mol_type = genomic DNA
tccagcctgggcgacagagc

SEQ ID NO: 162197 - DNA, 20 bp, Homo sapiens
  source 1..20: mol_type = genomic DNA
ccagcctgggcgacagagcg

SEQ ID NO: 162198 - DNA, 20 bp, Homo sapiens
  source 1..20: mol_type = genomic DNA
cagcctgggcgacagagcga

SEQ ID NO: 162199 - DNA, 20 bp, Homo sapiens
  source 1..20: mol_type = genomic DNA
agcctgggcgacagagcgag

SEQ ID NO: 162200 - DNA, 20 bp, Homo sapiens
  source 1..20: mol_type = genomic DNA
gcctgggcgacagagcgaga

SEQ ID NO: 162201 - DNA, 20 bp, Homo sapiens
  source 1..20: mol_type = genomic DNA
cctgggcgacagagcgagac

SEQ ID NO: 162202 - DNA, 20 bp, Homo sapiens
  source 1..20: mol_type = genomic DNA
ctgggcgacagagcgagact

SEQ ID NO: 162203 - DNA, 20 bp, Homo sapiens
  source 1..20: mol_type = genomic DNA
tgggcgacagagcgagactc

SEQ ID NO: 162204 - DNA, 20 bp, Homo sapiens
  source 1..20: mol_type = genomic DNA
gggcgacagagcgagactct

SEQ ID NO: 162205 - DNA, 20 bp, Homo sapiens
  source 1..20: mol_type = genomic DNA
ggcgacagagcgagactctt

SEQ ID NO: 162206 - DNA, 20 bp, Homo sapiens
  source 1..20: mol_type = genomic DNA
gcgacagagcgagactcttg

SEQ ID NO: 162207 - DNA, 20 bp, Homo sapiens
  source 1..20: mol_type = genomic DNA
cgacagagcgagactcttgt

SEQ ID NO: 162208 - DNA, 20 bp, Homo sapiens
  source 1..20: mol_type = genomic DNA
gacagagcgagactcttgtc

SEQ ID NO: 162209 - DNA, 20 bp, Homo sapiens
  source 1..20: mol_type = genomic DNA
acagagcgagactcttgtct

SEQ ID NO: 162210 - DNA, 20 bp, Homo sapiens
  source 1..20: mol_type = genomic DNA
cagagcgagactcttgtctc

SEQ ID NO: 162211 - DNA, 20 bp, Homo sapiens
  source 1..20: mol_type = genomic DNA
agagcgagactcttgtctca

SEQ ID NO: 162212 - DNA, 20 bp, Homo sapiens
  source 1..20: mol_type = genomic DNA
gagcgagactcttgtctcaa

SEQ ID NO: 162213 - DNA, 20 bp, Homo sapiens
  source 1..20: mol_type = genomic DNA
agcgagactcttgtctcaaa

SEQ ID NO: 162214 - DNA, 20 bp, Homo sapiens
  source 1..20: mol_type = genomic DNA
gcgagactcttgtctcaaaa

SEQ ID NO: 162215 - DNA, 20 bp, Homo sapiens
  source 1..20: mol_type = genomic DNA
cgagactcttgtctcaaaat

SEQ ID NO: 162216 - DNA, 20 bp, Homo sapiens
  source 1..20: mol_type = genomic DNA
gagactcttgtctcaaaata

SEQ ID NO: 162217 - DNA, 20 bp, Homo sapiens
  source 1..20: mol_type = genomic DNA
agactcttgtctcaaaataa

SEQ ID NO: 162218 - DNA, 20 bp, Homo sapiens
  source 1..20: mol_type = genomic DNA
gactcttgtctcaaaataaa

SEQ ID NO: 162219 - DNA, 20 bp, Homo sapiens
  source 1..20: mol_type = genomic DNA
actcttgtctcaaaataaaa

SEQ ID NO: 162220 - DNA, 20 bp, Homo sapiens
  source 1..20: mol_type = genomic DNA
ctcttgtctcaaaataaaaa

SEQ ID NO: 162221 - DNA, 20 bp, Homo sapiens
  source 1..20: mol_type = genomic DNA
tcttgtctcaaaataaaaaa

SEQ ID NO: 162222 - DNA, 20 bp, Homo sapiens
  source 1..20: mol_type = genomic DNA
cttgtctcaaaataaaaaac

SEQ ID NO: 162223 - DNA, 20 bp, Homo sapiens
  source 1..20: mol_type = genomic DNA
ttgtctcaaaataaaaaacg

SEQ ID NO: 162224 - DNA, 20 bp, Homo sapiens
  source 1..20: mol_type = genomic DNA
tgtctcaaaataaaaaacgt

SEQ ID NO: 162225 - DNA, 20 bp, Homo sapiens
  source 1..20: mol_type = genomic DNA
gtctcaaaataaaaaacgtt

SEQ ID NO: 162226 - DNA, 20 bp, Homo sapiens
  source 1..20: mol_type = genomic DNA
tctcaaaataaaaaacgttt

SEQ ID NO: 162227 - DNA, 20 bp, Homo sapiens
  source 1..20: mol_type = genomic DNA
ctcaaaataaaaaacgttta

SEQ ID NO: 162228 - DNA, 20 bp, Homo sapiens
  source 1..20: mol_type = genomic DNA
tcaaaataaaaaacgtttac

SEQ ID NO: 162229 - DNA, 20 bp, Homo sapiens
  source 1..20: mol_type = genomic DNA
caaaataaaaaacgtttaca

SEQ ID NO: 162230 - DNA, 20 bp, Homo sapiens
  source 1..20: mol_type = genomic DNA
aaaataaaaaacgtttacat

SEQ ID NO: 162231 - DNA, 20 bp, Homo sapiens
  source 1..20: mol_type = genomic DNA
aaataaaaaacgtttacatg

SEQ ID NO: 162232 - DNA, 20 bp, Homo sapiens
  source 1..20: mol_type = genomic DNA
aataaaaaacgtttacatgt

SEQ ID NO: 162233 - DNA, 20 bp, Homo sapiens
  source 1..20: mol_type = genomic DNA
ataaaaaacgtttacatgta

SEQ ID NO: 162234 - DNA, 20 bp, Homo sapiens
  source 1..20: mol_type = genomic DNA
taaaaaacgtttacatgtac

SEQ ID NO: 162235 - DNA, 20 bp, Homo sapiens
  source 1..20: mol_type = genomic DNA
aaaaaacgtttacatgtaca

SEQ ID NO: 162236 - DNA, 20 bp, Homo sapiens
  source 1..20: mol_type = genomic DNA
aaaaacgtttacatgtacat

SEQ ID NO: 162237 - DNA, 20 bp, Homo sapiens
  source 1..20: mol_type = genomic DNA
aaaacgtttacatgtacatg

SEQ ID NO: 162238 - DNA, 20 bp, Homo sapiens
  source 1..20: mol_type = genomic DNA
aaacgtttacatgtacatgt

SEQ ID NO: 162239 - DNA, 20 bp, Homo sapiens
  source 1..20: mol_type = genomic DNA
aacgtttacatgtacatgta

SEQ ID NO: 162240 - DNA, 20 bp, Homo sapiens
  source 1..20: mol_type = genomic DNA
acgtttacatgtacatgtat

SEQ ID NO: 162241 - DNA, 20 bp, Homo sapiens
  source 1..20: mol_type = genomic DNA
cgtttacatgtacatgtata

SEQ ID NO: 162242 - DNA, 20 bp, Homo sapiens
  source 1..20: mol_type = genomic DNA
gtttacatgtacatgtatat

SEQ ID NO: 162243 - DNA, 20 bp, Homo sapiens
  source 1..20: mol_type = genomic DNA
tttacatgtacatgtatatt

SEQ ID NO: 162244 - DNA, 20 bp, Homo sapiens
  source 1..20: mol_type = genomic DNA
ttacatgtacatgtatattc

SEQ ID NO: 162245 - DNA, 20 bp, Homo sapiens
  source 1..20: mol_type = genomic DNA
tacatgtacatgtatattca

SEQ ID NO: 162246 - DNA, 20 bp, Homo sapiens
  source 1..20: mol_type = genomic DNA
acatgtacatgtatattcaa

SEQ ID NO: 162247 - DNA, 20 bp, Homo sapiens
  source 1..20: mol_type = genomic DNA
catgtacatgtatattcaac

SEQ ID NO: 162248 - DNA, 20 bp, Homo sapiens
  source 1..20: mol_type = genomic DNA
atgtacatgtatattcaaca

SEQ ID NO: 162249 - DNA, 20 bp, Homo sapiens
  source 1..20: mol_type = genomic DNA
tgtacatgtatattcaacat

SEQ ID NO: 162250 - DNA, 20 bp, Homo sapiens
  source 1..20: mol_type = genomic DNA
gtacatgtatattcaacatg

SEQ ID NO: 162251 - DNA, 20 bp, Homo sapiens
  source 1..20: mol_type = genomic DNA
tacatgtatattcaacatgt

SEQ ID NO: 162252 - DNA, 20 bp, Homo sapiens
  source 1..20: mol_type = genomic DNA
acatgtatattcaacatgta

SEQ ID NO: 162253 - DNA, 20 bp, Homo sapiens
  source 1..20: mol_type = genomic DNA
catgtatattcaacatgtac

SEQ ID NO: 162254 - DNA, 20 bp, Homo sapiens
  source 1..20: mol_type = genomic DNA
atgtatattcaacatgtaca

SEQ ID NO: 162255 - DNA, 20 bp, Homo sapiens
  source 1..20: mol_type = genomic DNA
tgtatattcaacatgtacaa

SEQ ID NO: 162256 - DNA, 20 bp, Homo sapiens
  source 1..20: mol_type = genomic DNA
gtatattcaacatgtacaaa

SEQ ID NO: 162257 - DNA, 20 bp, Homo sapiens
  source 1..20: mol_type = genomic DNA
tatattcaacatgtacaaat

SEQ ID NO: 162258 - DNA, 20 bp, Homo sapiens
  source 1..20: mol_type = genomic DNA
atattcaacatgtacaaata

SEQ ID NO: 162259 - DNA, 20 bp, Homo sapiens
  source 1..20: mol_type = genomic DNA
tattcaacatgtacaaatat

SEQ ID NO: 162260 - DNA, 20 bp, Homo sapiens
  source 1..20: mol_type = genomic DNA
attcaacatgtacaaatata

SEQ ID NO: 162261 - DNA, 20 bp, Homo sapiens
  source 1..20: mol_type = genomic DNA
ttcaacatgtacaaatataa

SEQ ID NO: 162262 - DNA, 20 bp, Homo sapiens
  source 1..20: mol_type = genomic DNA
tcaacatgtacaaatataac

SEQ ID NO: 162263 - DNA, 20 bp, Homo sapiens
  source 1..20: mol_type = genomic DNA
caacatgtacaaatataacc

SEQ ID NO: 162264 - DNA, 20 bp, Homo sapiens
  source 1..20: mol_type = genomic DNA
aacatgtacaaatataacct

SEQ ID NO: 162265 - DNA, 20 bp, Homo sapiens
  source 1..20: mol_type = genomic DNA
acatgtacaaatataaccta

SEQ ID NO: 162266 - DNA, 20 bp, Homo sapiens
  source 1..20: mol_type = genomic DNA
catgtacaaatataacctat

SEQ ID NO: 162267 - DNA, 20 bp, Homo sapiens
  source 1..20: mol_type = genomic DNA
atgtacaaatataacctatt

SEQ ID NO: 162268 - DNA, 20 bp, Homo sapiens
  source 1..20: mol_type = genomic DNA
tgtacaaatataacctattc

SEQ ID NO: 162269 - DNA, 20 bp, Homo sapiens
  source 1..20: mol_type = genomic DNA
gtacaaatataacctattca

SEQ ID NO: 162270 - DNA, 20 bp, Homo sapiens
  source 1..20: mol_type = genomic DNA
tacaaatataacctattcaa

SEQ ID NO: 162271 - DNA, 20 bp, Homo sapiens
  source 1..20: mol_type = genomic DNA
acaaatataacctattcaaa

SEQ ID NO: 162272 - DNA, 20 bp, Homo sapiens
  source 1..20: mol_type = genomic DNA
caaatataacctattcaaaa

SEQ ID NO: 162273 - DNA, 20 bp, Homo sapiens
  source 1..20: mol_type = genomic DNA
aaatataacctattcaaaag

SEQ ID NO: 162274 - DNA, 20 bp, Homo sapiens
  source 1..20: mol_type = genomic DNA
aatataacctattcaaaagt

SEQ ID NO: 162275 - DNA, 20 bp, Homo sapiens
  source 1..20: mol_type = genomic DNA
atataacctattcaaaagta

SEQ ID NO: 162276 - DNA, 20 bp, Homo sapiens
  source 1..20: mol_type = genomic DNA
tataacctattcaaaagtat

SEQ ID NO: 162277 - DNA, 20 bp, Homo sapiens
  source 1..20: mol_type = genomic DNA
ataacctattcaaaagtatt

SEQ ID NO: 162278 - DNA, 20 bp, Homo sapiens
  source 1..20: mol_type = genomic DNA
taacctattcaaaagtattt

SEQ ID NO: 162279 - DNA, 20 bp, Homo sapiens
  source 1..20: mol_type = genomic DNA
aacctattcaaaagtattta

SEQ ID NO: 162280 - DNA, 20 bp, Homo sapiens
  source 1..20: mol_type = genomic DNA
acctattcaaaagtatttac

SEQ ID NO: 162281 - DNA, 20 bp, Homo sapiens
  source 1..20: mol_type = genomic DNA
cctattcaaaagtatttact

SEQ ID NO: 162282 - DNA, 20 bp, Homo sapiens
  source 1..20: mol_type = genomic DNA
ctattcaaaagtatttacta

SEQ ID NO: 162283 - DNA, 20 bp, Homo sapiens
  source 1..20: mol_type = genomic DNA
tattcaaaagtatttactac

SEQ ID NO: 162284 - DNA, 20 bp, Homo sapiens
  source 1..20: mol_type = genomic DNA
attcaaaagtatttactaca

SEQ ID NO: 162285 - DNA, 20 bp, Homo sapiens
  source 1..20: mol_type = genomic DNA
ttcaaaagtatttactacat

SEQ ID NO: 162286 - DNA, 20 bp, Homo sapiens
  source 1..20: mol_type = genomic DNA
tcaaaagtatttactacata

SEQ ID NO: 162287 - DNA, 20 bp, Homo sapiens
  source 1..20: mol_type = genomic DNA
caaaagtatttactacataa

SEQ ID NO: 162288 - DNA, 20 bp, Homo sapiens
  source 1..20: mol_type = genomic DNA
aaaagtatttactacataaa

SEQ ID NO: 162289 - DNA, 20 bp, Homo sapiens
  source 1..20: mol_type = genomic DNA
aaagtatttactacataaat

SEQ ID NO: 162290 - DNA, 20 bp, Homo sapiens
  source 1..20: mol_type = genomic DNA
aagtatttactacataaata

SEQ ID NO: 162291 - DNA, 20 bp, Homo sapiens
  source 1..20: mol_type = genomic DNA
agtatttactacataaatag

SEQ ID NO: 162292 - DNA, 20 bp, Homo sapiens
  source 1..20: mol_type = genomic DNA
gtatttactacataaatagg

SEQ ID NO: 162293 - DNA, 20 bp, Homo sapiens
  source 1..20: mol_type = genomic DNA
tatttactacataaataggt

SEQ ID NO: 162294 - DNA, 20 bp, Homo sapiens
  source 1..20: mol_type = genomic DNA
atttactacataaataggta

SEQ ID NO: 162295 - DNA, 20 bp, Homo sapiens
  source 1..20: mol_type = genomic DNA
tttactacataaataggtac

SEQ ID NO: 162296 - DNA, 20 bp, Homo sapiens
  source 1..20: mol_type = genomic DNA
ttactacataaataggtact

SEQ ID NO: 162297 - DNA, 20 bp, Homo sapiens
  source 1..20: mol_type = genomic DNA
tactacataaataggtactt

SEQ ID NO: 162298 - DNA, 20 bp, Homo sapiens
  source 1..20: mol_type = genomic DNA
actacataaataggtactta

SEQ ID NO: 162299 - DNA, 20 bp, Homo sapiens
  source 1..20: mol_type = genomic DNA
ctacataaataggtacttac

SEQ ID NO: 162300 - DNA, 20 bp, Homo sapiens
  source 1..20: mol_type = genomic DNA
tacataaataggtacttaca

SEQ ID NO: 162301 - DNA, 20 bp, Homo sapiens
  source 1..20: mol_type = genomic DNA
acataaataggtacttacat

SEQ ID NO: 162302 - DNA, 20 bp, Homo sapiens
  source 1..20: mol_type = genomic DNA
cataaataggtacttacatt

SEQ ID NO: 162303 - DNA, 20 bp, Homo sapiens
  source 1..20: mol_type = genomic DNA
ataaataggtacttacatta

SEQ ID NO: 162304 - DNA, 20 bp, Homo sapiens
  source 1..20: mol_type = genomic DNA
taaataggtacttacattac

SEQ ID NO: 162305 - DNA, 20 bp, Homo sapiens
  source 1..20: mol_type = genomic DNA
aaataggtacttacattacc

SEQ ID NO: 162306 - DNA, 20 bp, Homo sapiens
  source 1..20: mol_type = genomic DNA
aataggtacttacattacct

SEQ ID NO: 162307 - DNA, 20 bp, Homo sapiens
  source 1..20: mol_type = genomic DNA
ataggtacttacattaccta

SEQ ID NO: 162308 - DNA, 20 bp, Homo sapiens
  source 1..20: mol_type = genomic DNA
taggtacttacattacctat

SEQ ID NO: 162309 - DNA, 20 bp, Homo sapiens
  source 1..20: mol_type = genomic DNA
aggtacttacattacctatt

SEQ ID NO: 162310 - DNA, 20 bp, Homo sapiens
  source 1..20: mol_type = genomic DNA
ggtacttacattacctattt

SEQ ID NO: 162311 - DNA, 20 bp, Homo sapiens
  source 1..20: mol_type = genomic DNA
gtacttacattacctattta

SEQ ID NO: 162312 - DNA, 20 bp, Homo sapiens
  source 1..20: mol_type = genomic DNA
tacttacattacctatttac

SEQ ID NO: 162313 - DNA, 20 bp, Homo sapiens
  source 1..20: mol_type = genomic DNA
acttacattacctatttact

SEQ ID NO: 162314 - DNA, 20 bp, Homo sapiens
  source 1..20: mol_type = genomic DNA
cttacattacctatttactg

SEQ ID NO: 162315 - DNA, 20 bp, Homo sapiens
  source 1..20: mol_type = genomic DNA
ttacattacctatttactgt

SEQ ID NO: 162316 - DNA, 20 bp, Homo sapiens
  source 1..20: mol_type = genomic DNA
tacattacctatttactgta

SEQ ID NO: 162317 - DNA, 20 bp, Homo sapiens
  source 1..20: mol_type = genomic DNA
acattacctatttactgtaa

SEQ ID NO: 162318 - DNA, 20 bp, Homo sapiens
  source 1..20: mol_type = genomic DNA
cattacctatttactgtaat

SEQ ID NO: 162319 - DNA, 20 bp, Homo sapiens
  source 1..20: mol_type = genomic DNA
attacctatttactgtaata

SEQ ID NO: 162320 - DNA, 20 bp, Homo sapiens
  source 1..20: mol_type = genomic DNA
ttacctatttactgtaatag

SEQ ID NO: 162321 - DNA, 20 bp, Homo sapiens
  source 1..20: mol_type = genomic DNA
tacctatttactgtaatagt

SEQ ID NO: 162322 - DNA, 20 bp, Homo sapiens
  source 1..20: mol_type = genomic DNA
acctatttactgtaatagtc

SEQ ID NO: 162323 - DNA, 20 bp, Homo sapiens
  source 1..20: mol_type = genomic DNA
cctatttactgtaatagtca

SEQ ID NO: 162324 - DNA, 20 bp, Homo sapiens
  source 1..20: mol_type = genomic DNA
ctatttactgtaatagtcaa

SEQ ID NO: 162325 - DNA, 20 bp, Homo sapiens
  source 1..20: mol_type = genomic DNA
tatttactgtaatagtcaaa

SEQ ID NO: 162326 - DNA, 20 bp, Homo sapiens
  source 1..20: mol_type = genomic DNA
atttactgtaatagtcaaag

SEQ ID NO: 162327 - DNA, 20 bp, Homo sapiens
  source 1..20: mol_type = genomic DNA
tttactgtaatagtcaaagc

SEQ ID NO: 162328 - DNA, 20 bp, Homo sapiens
  source 1..20: mol_type = genomic DNA
ttactgtaatagtcaaagcc

SEQ ID NO: 162329 - DNA, 20 bp, Homo sapiens
  source 1..20: mol_type = genomic DNA
tactgtaatagtcaaagcct

SEQ ID NO: 162330 - DNA, 20 bp, Homo sapiens
  source 1..20: mol_type = genomic DNA
actgtaatagtcaaagccta

SEQ ID NO: 162331 - DNA, 20 bp, Homo sapiens
  source 1..20: mol_type = genomic DNA
ctgtaatagtcaaagcctat

SEQ ID NO: 162332 - DNA, 20 bp, Homo sapiens
  source 1..20: mol_type = genomic DNA
tgtaatagtcaaagcctatg

SEQ ID NO: 162333 - DNA, 20 bp, Homo sapiens
  source 1..20: mol_type = genomic DNA
gtaatagtcaaagcctatga

SEQ ID NO: 162334 - DNA, 20 bp, Homo sapiens
  source 1..20: mol_type = genomic DNA
taatagtcaaagcctatgaa

SEQ ID NO: 162335 - DNA, 20 bp, Homo sapiens
  source 1..20: mol_type = genomic DNA
aatagtcaaagcctatgaag

SEQ ID NO: 162336 - DNA, 20 bp, Homo sapiens
  source 1..20: mol_type = genomic DNA
atagtcaaagcctatgaagt

SEQ ID NO: 162337 - DNA, 20 bp, Homo sapiens
  source 1..20: mol_type = genomic DNA
tagtcaaagcctatgaagta

SEQ ID NO: 162338 - DNA, 20 bp, Homo sapiens
  source 1..20: mol_type = genomic DNA
agtcaaagcctatgaagtat

SEQ ID NO: 162339 - DNA, 20 bp, Homo sapiens
  source 1..20: mol_type = genomic DNA
gtcaaagcctatgaagtatc

SEQ ID NO: 162340 - DNA, 20 bp, Homo sapiens
  source 1..20: mol_type = genomic DNA
tcaaagcctatgaagtatct

SEQ ID NO: 162341 - DNA, 20 bp, Homo sapiens
  source 1..20: mol_type = genomic DNA
caaagcctatgaagtatcta

SEQ ID NO: 162342 - DNA, 20 bp, Homo sapiens
  source 1..20: mol_type = genomic DNA
aaagcctatgaagtatctaa

SEQ ID NO: 162343 - DNA, 20 bp, Homo sapiens
  source 1..20: mol_type = genomic DNA
aagcctatgaagtatctaac

SEQ ID NO: 162344 - DNA, 20 bp, Homo sapiens
  source 1..20: mol_type = genomic DNA
agcctatgaagtatctaaca

SEQ ID NO: 162345 - DNA, 20 bp, Homo sapiens
  source 1..20: mol_type = genomic DNA
gcctatgaagtatctaacac

SEQ ID NO: 162346 - DNA, 20 bp, Homo sapiens
  source 1..20: mol_type = genomic DNA
cctatgaagtatctaacact

SEQ ID NO: 162347 - DNA, 20 bp, Homo sapiens
  source 1..20: mol_type = genomic DNA
ctatgaagtatctaacactg

SEQ ID NO: 162348 - DNA, 20 bp, Homo sapiens
  source 1..20: mol_type = genomic DNA
tatgaagtatctaacactga

SEQ ID NO: 162349 - DNA, 20 bp, Homo sapiens
  source 1..20: mol_type = genomic DNA
atgaagtatctaacactgat

SEQ ID NO: 162350 - DNA, 20 bp, Homo sapiens
  source 1..20: mol_type = genomic DNA
tgaagtatctaacactgatg

SEQ ID NO: 162351 - DNA, 20 bp, Homo sapiens
  source 1..20: mol_type = genomic DNA
gaagtatctaacactgatgt

SEQ ID NO: 162352 - DNA, 20 bp, Homo sapiens
  source 1..20: mol_type = genomic DNA
aagtatctaacactgatgtg

SEQ ID NO: 162353 - DNA, 20 bp, Homo sapiens
  source 1..20: mol_type = genomic DNA
agtatctaacactgatgtgt

SEQ ID NO: 162354 - DNA, 20 bp, Homo sapiens
  source 1..20: mol_type = genomic DNA
gtatctaacactgatgtgta

SEQ ID NO: 162355 - DNA, 20 bp, Homo sapiens
  source 1..20: mol_type = genomic DNA
tatctaacactgatgtgtag

SEQ ID NO: 162356 - DNA, 20 bp, Homo sapiens
  source 1..20: mol_type = genomic DNA
atctaacactgatgtgtagg

SEQ ID NO: 162357 - DNA, 20 bp, Homo sapiens
  source 1..20: mol_type = genomic DNA
tctaacactgatgtgtaggt

SEQ ID NO: 162358 - DNA, 20 bp, Homo sapiens
  source 1..20: mol_type = genomic DNA
ctaacactgatgtgtaggta

SEQ ID NO: 162359 - DNA, 20 bp, Homo sapiens
  source 1..20: mol_type = genomic DNA
taacactgatgtgtaggtac

SEQ ID NO: 162360 - DNA, 20 bp, Homo sapiens
  source 1..20: mol_type = genomic DNA
aacactgatgtgtaggtact

SEQ ID NO: 162361 - DNA, 20 bp, Homo sapiens
  source 1..20: mol_type = genomic DNA
acactgatgtgtaggtactc

SEQ ID NO: 162362 - DNA, 20 bp, Homo sapiens
  source 1..20: mol_type = genomic DNA
cactgatgtgtaggtactca

SEQ ID NO: 162363 - DNA, 20 bp, Homo sapiens
  source 1..20: mol_type = genomic DNA
actgatgtgtaggtactcac

SEQ ID NO: 162364 - DNA, 20 bp, Homo sapiens
  source 1..20: mol_type = genomic DNA
ctgatgtgtaggtactcact

SEQ ID NO: 162365 - DNA, 20 bp, Homo sapiens
  source 1..20: mol_type = genomic DNA
tgatgtgtaggtactcactt

SEQ ID NO: 162366 - DNA, 20 bp, Homo sapiens
  source 1..20: mol_type = genomic DNA
gatgtgtaggtactcacttt

SEQ ID NO: 162367 - DNA, 20 bp, Homo sapiens
  source 1..20: mol_type = genomic DNA
atgtgtaggtactcactttg

SEQ ID NO: 162368 - DNA, 20 bp, Homo sapiens
  source 1..20: mol_type = genomic DNA
tgtgtaggtactcactttgc

SEQ ID NO: 162369 - DNA, 20 bp, Homo sapiens
  source 1..20: mol_type = genomic DNA
gtgtaggtactcactttgct

SEQ ID NO: 162370 - DNA, 20 bp, Homo sapiens
  source 1..20: mol_type = genomic DNA
tgtaggtactcactttgctt

SEQ ID NO: 162371 - DNA, 20 bp, Homo sapiens
  source 1..20: mol_type = genomic DNA
gtaggtactcactttgcttg

SEQ ID NO: 162372 - DNA, 20 bp, Homo sapiens
  source 1..20: mol_type = genomic DNA
taggtactcactttgcttgc

SEQ ID NO: 162373 - DNA, 20 bp, Homo sapiens
  source 1..20: mol_type = genomic DNA
aggtactcactttgcttgcc

SEQ ID NO: 162374 - DNA, 20 bp, Homo sapiens
  source 1..20: mol_type = genomic DNA
ggtactcactttgcttgcca

SEQ ID NO: 162375 - DNA, 20 bp, Homo sapiens
  source 1..20: mol_type = genomic DNA
gtactcactttgcttgccac

SEQ ID NO: 162376 - DNA, 20 bp, Homo sapiens
  source 1..20: mol_type = genomic DNA
tactcactttgcttgccact

SEQ ID NO: 162377 - DNA, 20 bp, Homo sapiens
  source 1..20: mol_type = genomic DNA
actcactttgcttgccactc

SEQ ID NO: 162378 - DNA, 20 bp, Homo sapiens
  source 1..20: mol_type = genomic DNA
ctcactttgcttgccactct

SEQ ID NO: 162379 - DNA, 20 bp, Homo sapiens
  source 1..20: mol_type = genomic DNA
tcactttgcttgccactcta

SEQ ID NO: 162380 - DNA, 20 bp, Homo sapiens
  source 1..20: mol_type = genomic DNA
cactttgcttgccactctat

SEQ ID NO: 162381 - DNA, 20 bp, Homo sapiens
  source 1..20: mol_type = genomic DNA
actttgcttgccactctatt

SEQ ID NO: 162382 - DNA, 20 bp, Homo sapiens
  source 1..20: mol_type = genomic DNA
ctttgcttgccactctatta

SEQ ID NO: 162383 - DNA, 20 bp, Homo sapiens
  source 1..20: mol_type = genomic DNA
tttgcttgccactctattag

SEQ ID NO: 162384 - DNA, 20 bp, Homo sapiens
  source 1..20: mol_type = genomic DNA
ttgcttgccactctattagg

SEQ ID NO: 162385 - DNA, 20 bp, Homo sapiens
  source 1..20: mol_type = genomic DNA
tgcttgccactctattaggt

SEQ ID NO: 162386 - DNA, 20 bp, Homo sapiens
  source 1..20: mol_type = genomic DNA
gcttgccactctattaggtg

SEQ ID NO: 162387 - DNA, 20 bp, Homo sapiens
  source 1..20: mol_type = genomic DNA
cttgccactctattaggtgc

SEQ ID NO: 162388 - DNA, 20 bp, Homo sapiens
  source 1..20: mol_type = genomic DNA
ttgccactctattaggtgct

SEQ ID NO: 162389 - DNA, 20 bp, Homo sapiens
  source 1..20: mol_type = genomic DNA
tgccactctattaggtgctt

SEQ ID NO: 162390 - DNA, 20 bp, Homo sapiens
  source 1..20: mol_type = genomic DNA
gccactctattaggtgcttt

SEQ ID NO: 162391 - DNA, 20 bp, Homo sapiens
  source 1..20: mol_type = genomic DNA
ccactctattaggtgctttt

SEQ ID NO: 162392 - DNA, 20 bp, Homo sapiens
  source 1..20: mol_type = genomic DNA
cactctattaggtgcttttt

SEQ ID NO: 162393 - DNA, 20 bp, Homo sapiens
  source 1..20: mol_type = genomic DNA
actctattaggtgcttttta

SEQ ID NO: 162394 - DNA, 20 bp, Homo sapiens
  source 1..20: mol_type = genomic DNA
ctctattaggtgctttttat

SEQ ID NO: 162395 - DNA, 20 bp, Homo sapiens
  source 1..20: mol_type = genomic DNA
tctattaggtgctttttatg

SEQ ID NO: 162396 - DNA, 20 bp, Homo sapiens
  source 1..20: mol_type = genomic DNA
ctattaggtgctttttatgt

SEQ ID NO: 162397 - DNA, 20 bp, Homo sapiens
  source 1..20: mol_type = genomic DNA
tattaggtgctttttatgtt

SEQ ID NO: 162398 - DNA, 20 bp, Homo sapiens
  source 1..20: mol_type = genomic DNA
attaggtgctttttatgtta

SEQ ID NO: 162399 - DNA, 20 bp, Homo sapiens
  source 1..20: mol_type = genomic DNA
ttaggtgctttttatgttat

SEQ ID NO: 162400 - DNA, 20 bp, Homo sapiens
  source 1..20: mol_type = genomic DNA
taggtgctttttatgttatt

SEQ ID NO: 162401 - DNA, 20 bp, Homo sapiens
  source 1..20: mol_type = genomic DNA
aggtgctttttatgttattt

SEQ ID NO: 162402 - DNA, 20 bp, Homo sapiens
  source 1..20: mol_type = genomic DNA
ggtgctttttatgttattta

SEQ ID NO: 162403 - DNA, 20 bp, Homo sapiens
  source 1..20: mol_type = genomic DNA
gtgctttttatgttatttaa

SEQ ID NO: 162404 - DNA, 20 bp, Homo sapiens
  source 1..20: mol_type = genomic DNA
tgctttttatgttatttaat

SEQ ID NO: 162405 - DNA, 20 bp, Homo sapiens
  source 1..20: mol_type = genomic DNA
gctttttatgttatttaatc

SEQ ID NO: 162406 - DNA, 20 bp, Homo sapiens
  source 1..20: mol_type = genomic DNA
ctttttatgttatttaatca

SEQ ID NO: 162407 - DNA, 20 bp, Homo sapiens
  source 1..20: mol_type = genomic DNA
tttttatgttatttaatcat

SEQ ID NO: 162408 - DNA, 20 bp, Homo sapiens
  source 1..20: mol_type = genomic DNA
ttttatgttatttaatcatg

SEQ ID NO: 162409 - DNA, 20 bp, Homo sapiens
  source 1..20: mol_type = genomic DNA
tttatgttatttaatcatga

SEQ ID NO: 162410 - DNA, 20 bp, Homo sapiens
  source 1..20: mol_type = genomic DNA
ttatgttatttaatcatgaa

SEQ ID NO: 162411 - DNA, 20 bp, Homo sapiens
  source 1..20: mol_type = genomic DNA
tatgttatttaatcatgaag

SEQ ID NO: 162412 - DNA, 20 bp, Homo sapiens
  source 1..20: mol_type = genomic DNA
atgttatttaatcatgaagc

SEQ ID NO: 162413 - DNA, 20 bp, Homo sapiens
  source 1..20: mol_type = genomic DNA
tgttatttaatcatgaagcc

SEQ ID NO: 162414 - DNA, 20 bp, Homo sapiens
  source 1..20: mol_type = genomic DNA
gttatttaatcatgaagcct

SEQ ID NO: 162415 - DNA, 20 bp, Homo sapiens
  source 1..20: mol_type = genomic DNA
ttatttaatcatgaagcctg

SEQ ID NO: 162416 - DNA, 20 bp, Homo sapiens
  source 1..20: mol_type = genomic DNA
tatttaatcatgaagcctgg

SEQ ID NO: 162417 - DNA, 20 bp, Homo sapiens
  source 1..20: mol_type = genomic DNA
atttaatcatgaagcctggc

SEQ ID NO: 162418 - DNA, 20 bp, Homo sapiens
  source 1..20: mol_type = genomic DNA
tttaatcatgaagcctggcc

SEQ ID NO: 162419 - DNA, 20 bp, Homo sapiens
  source 1..20: mol_type = genomic DNA
ttaatcatgaagcctggcca

SEQ ID NO: 162420 - DNA, 20 bp, Homo sapiens
  source 1..20: mol_type = genomic DNA
taatcatgaagcctggccac

SEQ ID NO: 162421 - DNA, 20 bp, Homo sapiens
  source 1..20: mol_type = genomic DNA
aatcatgaagcctggccaca

SEQ ID NO: 162422 - DNA, 20 bp, Homo sapiens
  source 1..20: mol_type = genomic DNA
atcatgaagcctggccacag

SEQ ID NO: 162423 - DNA, 20 bp, Homo sapiens
  source 1..20: mol_type = genomic DNA
tcatgaagcctggccacagg

SEQ ID NO: 162424 - DNA, 20 bp, Homo sapiens
  source 1..20: mol_type = genomic DNA
catgaagcctggccacaggg

SEQ ID NO: 162425 - DNA, 20 bp, Homo sapiens
  source 1..20: mol_type = genomic DNA
atgaagcctggccacagggt

SEQ ID NO: 162426 - DNA, 20 bp, Homo sapiens
  source 1..20: mol_type = genomic DNA
tgaagcctggccacagggtg

SEQ ID NO: 162427 - DNA, 20 bp, Homo sapiens
  source 1..20: mol_type = genomic DNA
gaagcctggccacagggtgc

SEQ ID NO: 162428 - DNA, 20 bp, Homo sapiens
  source 1..20: mol_type = genomic DNA
aagcctggccacagggtgct

SEQ ID NO: 162429 - DNA, 20 bp, Homo sapiens
  source 1..20: mol_type = genomic DNA
agcctggccacagggtgctt

SEQ ID NO: 162430 - DNA, 20 bp, Homo sapiens
  source 1..20: mol_type = genomic DNA
gcctggccacagggtgcttg

SEQ ID NO: 162431 - DNA, 20 bp, Homo sapiens
  source 1..20: mol_type = genomic DNA
cctggccacagggtgcttgt

SEQ ID NO: 162432 - DNA, 20 bp, Homo sapiens
  source 1..20: mol_type = genomic DNA
ctggccacagggtgcttgtg

SEQ ID NO: 162433 - DNA, 20 bp, Homo sapiens
  source 1..20: mol_type = genomic DNA
tggccacagggtgcttgtgc

SEQ ID NO: 162434 - DNA, 20 bp, Homo sapiens
  source 1..20: mol_type = genomic DNA
ggccacagggtgcttgtgca

SEQ ID NO: 162435 - DNA, 20 bp, Homo sapiens
  source 1..20: mol_type = genomic DNA
gccacagggtgcttgtgcat

SEQ ID NO: 162436 - DNA, 20 bp, Homo sapiens
  source 1..20: mol_type = genomic DNA
ccacagggtgcttgtgcatt

SEQ ID NO: 162437 - DNA, 20 bp, Homo sapiens
  source 1..20: mol_type = genomic DNA
cacagggtgcttgtgcattg

SEQ ID NO: 162438 - DNA, 20 bp, Homo sapiens
  source 1..20: mol_type = genomic DNA
acagggtgcttgtgcattga

SEQ ID NO: 162439 - DNA, 20 bp, Homo sapiens
  source 1..20: mol_type = genomic DNA
cagggtgcttgtgcattgag

SEQ ID NO: 162440 - DNA, 20 bp, Homo sapiens
  source 1..20: mol_type = genomic DNA
agggtgcttgtgcattgagt

SEQ ID NO: 162441 - DNA, 20 bp, Homo sapiens
  source 1..20: mol_type = genomic DNA
gggtgcttgtgcattgagtg

SEQ ID NO: 162442 - DNA, 20 bp, Homo sapiens
  source 1..20: mol_type = genomic DNA
ggtgcttgtgcattgagtgt

SEQ ID NO: 162443 - DNA, 20 bp, Homo sapiens
  source 1..20: mol_type = genomic DNA
gtgcttgtgcattgagtgtg

SEQ ID NO: 162444 - DNA, 20 bp, Homo sapiens
  source 1..20: mol_type = genomic DNA
tgcttgtgcattgagtgtgg

SEQ ID NO: 162445 - DNA, 20 bp, Homo sapiens
  source 1..20: mol_type = genomic DNA
gcttgtgcattgagtgtggg

SEQ ID NO: 162446 - DNA, 20 bp, Homo sapiens
  source 1..20: mol_type = genomic DNA
cttgtgcattgagtgtggga

SEQ ID NO: 162447 - DNA, 20 bp, Homo sapiens
  source 1..20: mol_type = genomic DNA
ttgtgcattgagtgtgggaa

SEQ ID NO: 162448 - DNA, 20 bp, Homo sapiens
  source 1..20: mol_type = genomic DNA
tgtgcattgagtgtgggaac

SEQ ID NO: 162449 - DNA, 20 bp, Homo sapiens
  source 1..20: mol_type = genomic DNA
gtgcattgagtgtgggaaca

SEQ ID NO: 162450 - DNA, 20 bp, Homo sapiens
  source 1..20: mol_type = genomic DNA
tgcattgagtgtgggaacaa

SEQ ID NO: 162451 - DNA, 20 bp, Homo sapiens
  source 1..20: mol_type = genomic DNA
gcattgagtgtgggaacaag

SEQ ID NO: 162452 - DNA, 20 bp, Homo sapiens
  source 1..20: mol_type = genomic DNA
cattgagtgtgggaacaaga

SEQ ID NO: 162453 - DNA, 20 bp, Homo sapiens
  source 1..20: mol_type = genomic DNA
attgagtgtgggaacaagat

SEQ ID NO: 162454 - DNA, 20 bp, Homo sapiens
  source 1..20: mol_type = genomic DNA
ttgagtgtgggaacaagatt

SEQ ID NO: 162455 - DNA, 20 bp, Homo sapiens
  source 1..20: mol_type = genomic DNA
tgagtgtgggaacaagatta

SEQ ID NO: 162456 - DNA, 20 bp, Homo sapiens
  source 1..20: mol_type = genomic DNA
gagtgtgggaacaagattac

SEQ ID NO: 162457 - DNA, 20 bp, Homo sapiens
  source 1..20: mol_type = genomic DNA
agtgtgggaacaagattacc

SEQ ID NO: 162458 - DNA, 20 bp, Homo sapiens
  source 1..20: mol_type = genomic DNA
gtgtgggaacaagattacca

SEQ ID NO: 162459 - DNA, 20 bp, Homo sapiens
  source 1..20: mol_type = genomic DNA
tgtgggaacaagattaccat

SEQ ID NO: 162460 - DNA, 20 bp, Homo sapiens
  source 1..20: mol_type = genomic DNA
gtgggaacaagattaccatc

SEQ ID NO: 162461 - DNA, 20 bp, Homo sapiens
  source 1..20: mol_type = genomic DNA
tgggaacaagattaccatct

SEQ ID NO: 162462 - DNA, 20 bp, Homo sapiens
  source 1..20: mol_type = genomic DNA
gggaacaagattaccatctc

SEQ ID NO: 162463 - DNA, 20 bp, Homo sapiens
  source 1..20: mol_type = genomic DNA
ggaacaagattaccatctcc

SEQ ID NO: 162464 - DNA, 20 bp, Homo sapiens
  source 1..20: mol_type = genomic DNA
gaacaagattaccatctccc

SEQ ID NO: 162465 - DNA, 20 bp, Homo sapiens
  source 1..20: mol_type = genomic DNA
aacaagattaccatctccct

SEQ ID NO: 162466 - DNA, 20 bp, Homo sapiens
  source 1..20: mol_type = genomic DNA
acaagattaccatctccctt

SEQ ID NO: 162467 - DNA, 20 bp, Homo sapiens
  source 1..20: mol_type = genomic DNA
caagattaccatctcccttt

SEQ ID NO: 162468 - DNA, 20 bp, Homo sapiens
  source 1..20: mol_type = genomic DNA
aagattaccatctccctttt

SEQ ID NO: 162469 - DNA, 20 bp, Homo sapiens
  source 1..20: mol_type = genomic DNA
agattaccatctcccttttg

SEQ ID NO: 162470 - DNA, 20 bp, Homo sapiens
  source 1..20: mol_type = genomic DNA
gattaccatctcccttttga

SEQ ID NO: 162471 - DNA, 20 bp, Homo sapiens
  source 1..20: mol_type = genomic DNA
attaccatctcccttttgag

SEQ ID NO: 162472 - DNA, 20 bp, Homo sapiens
  source 1..20: mol_type = genomic DNA
ttaccatctcccttttgagg

SEQ ID NO: 162473 - DNA, 20 bp, Homo sapiens
  source 1..20: mol_type = genomic DNA
taccatctcccttttgagga

SEQ ID NO: 162474 - DNA, 20 bp, Homo sapiens
  source 1..20: mol_type = genomic DNA
accatctcccttttgaggac

SEQ ID NO: 162475 - DNA, 20 bp, Homo sapiens
  source 1..20: mol_type = genomic DNA
ccatctcccttttgaggaca

SEQ ID NO: 162476 - DNA, 20 bp, Homo sapiens
  source 1..20: mol_type = genomic DNA
catctcccttttgaggacac

SEQ ID NO: 162477 - DNA, 20 bp, Homo sapiens
  source 1..20: mol_type = genomic DNA
atctcccttttgaggacaca

SEQ ID NO: 162478 - DNA, 20 bp, Homo sapiens
  source 1..20: mol_type = genomic DNA
tctcccttttgaggacacag

SEQ ID NO: 162479 - DNA, 20 bp, Homo sapiens
  source 1..20: mol_type = genomic DNA
ctcccttttgaggacacagg

SEQ ID NO: 162480 - DNA, 20 bp, Homo sapiens
  source 1..20: mol_type = genomic DNA
tcccttttgaggacacaggc

SEQ ID NO: 162481 - DNA, 20 bp, Homo sapiens
  source 1..20: mol_type = genomic DNA
cccttttgaggacacaggcc

SEQ ID NO: 162482 - DNA, 20 bp, Homo sapiens
  source 1..20: mol_type = genomic DNA
ccttttgaggacacaggcct

SEQ ID NO: 162483 - DNA, 20 bp, Homo sapiens
  source 1..20: mol_type = genomic DNA
cttttgaggacacaggccta

SEQ ID NO: 162484 - DNA, 20 bp, Homo sapiens
  source 1..20: mol_type = genomic DNA
ttttgaggacacaggcctag

SEQ ID NO: 162485 - DNA, 20 bp, Homo sapiens
  source 1..20: mol_type = genomic DNA
tttgaggacacaggcctaga

SEQ ID NO: 162486 - DNA, 20 bp, Homo sapiens
  source 1..20: mol_type = genomic DNA
ttgaggacacaggcctagag

SEQ ID NO: 162487 - DNA, 20 bp, Homo sapiens
  source 1..20: mol_type = genomic DNA
tgaggacacaggcctagagc

SEQ ID NO: 162488 - DNA, 20 bp, Homo sapiens
  source 1..20: mol_type = genomic DNA
gaggacacaggcctagagca

SEQ ID NO: 162489 - DNA, 20 bp, Homo sapiens
  source 1..20: mol_type = genomic DNA
aggacacaggcctagagcag

SEQ ID NO: 162490 - DNA, 20 bp, Homo sapiens
  source 1..20: mol_type = genomic DNA
ggacacaggcctagagcagt

SEQ ID NO: 162491 - DNA, 20 bp, Homo sapiens
  source 1..20: mol_type = genomic DNA
gacacaggcctagagcagtt

SEQ ID NO: 162492 - DNA, 20 bp, Homo sapiens
  source 1..20: mol_type = genomic DNA
acacaggcctagagcagtta

SEQ ID NO: 162493 - DNA, 20 bp, Homo sapiens
  source 1..20: mol_type = genomic DNA
cacaggcctagagcagttaa

SEQ ID NO: 162494 - DNA, 20 bp, Homo sapiens
  source 1..20: mol_type = genomic DNA
acaggcctagagcagttaag

SEQ ID NO: 162495 - DNA, 20 bp, Homo sapiens
  source 1..20: mol_type = genomic DNA
caggcctagagcagttaagc

SEQ ID NO: 162496 - DNA, 20 bp, Homo sapiens
  source 1..20: mol_type = genomic DNA
aggcctagagcagttaagca

SEQ ID NO: 162497 - DNA, 20 bp, Homo sapiens
  source 1..20: mol_type = genomic DNA
ggcctagagcagttaagcag

SEQ ID NO: 162498 - DNA, 20 bp, Homo sapiens
  source 1..20: mol_type = genomic DNA
gcctagagcagttaagcagc

SEQ ID NO: 162499 - DNA, 20 bp, Homo sapiens
  source 1..20: mol_type = genomic DNA
cctagagcagttaagcagct

SEQ ID NO: 162500 - DNA, 20 bp, Homo sapiens
  source 1..20: mol_type = genomic DNA
ctagagcagttaagcagctt

SEQ ID NO: 162501 - DNA, 20 bp, Homo sapiens
  source 1..20: mol_type = genomic DNA
tagagcagttaagcagcttg

SEQ ID NO: 162502 - DNA, 20 bp, Homo sapiens
  source 1..20: mol_type = genomic DNA
agagcagttaagcagcttgc

SEQ ID NO: 162503 - DNA, 20 bp, Homo sapiens
  source 1..20: mol_type = genomic DNA
gagcagttaagcagcttgct

SEQ ID NO: 162504 - DNA, 20 bp, Homo sapiens
  source 1..20: mol_type = genomic DNA
agcagttaagcagcttgctg

SEQ ID NO: 162505 - DNA, 20 bp, Homo sapiens
  source 1..20: mol_type = genomic DNA
gcagttaagcagcttgctgg

SEQ ID NO: 162506 - DNA, 20 bp, Homo sapiens
  source 1..20: mol_type = genomic DNA
cagttaagcagcttgctgga

SEQ ID NO: 162507 - DNA, 20 bp, Homo sapiens
  source 1..20: mol_type = genomic DNA
agttaagcagcttgctggag

SEQ ID NO: 162508 - DNA, 20 bp, Homo sapiens
  source 1..20: mol_type = genomic DNA
gttaagcagcttgctggagg

SEQ ID NO: 162509 - DNA, 20 bp, Homo sapiens
  source 1..20: mol_type = genomic DNA
ttaagcagcttgctggaggt

SEQ ID NO: 162510 - DNA, 20 bp, Homo sapiens
  source 1..20: mol_type = genomic DNA
taagcagcttgctggaggtt

SEQ ID NO: 162511 - DNA, 20 bp, Homo sapiens
  source 1..20: mol_type = genomic DNA
aagcagcttgctggaggttc

SEQ ID NO: 162512 - DNA, 20 bp, Homo sapiens
  source 1..20: mol_type = genomic DNA
agcagcttgctggaggttca

SEQ ID NO: 162513 - DNA, 20 bp, Homo sapiens
  source 1..20: mol_type = genomic DNA
gcagcttgctggaggttcac

SEQ ID NO: 162514 - DNA, 20 bp, Homo sapiens
  source 1..20: mol_type = genomic DNA
cagcttgctggaggttcact

SEQ ID NO: 162515 - DNA, 20 bp, Homo sapiens
  source 1..20: mol_type = genomic DNA
agcttgctggaggttcactg

SEQ ID NO: 162516 - DNA, 20 bp, Homo sapiens
  source 1..20: mol_type = genomic DNA
gcttgctggaggttcactgg

SEQ ID NO: 162517 - DNA, 20 bp, Homo sapiens
  source 1..20: mol_type = genomic DNA
cttgctggaggttcactggc

SEQ ID NO: 162518 - DNA, 20 bp, Homo sapiens
  source 1..20: mol_type = genomic DNA
ttgctggaggttcactggct

SEQ ID NO: 162519 - DNA, 20 bp, Homo sapiens
  source 1..20: mol_type = genomic DNA
tgctggaggttcactggcta

SEQ ID NO: 162520 - DNA, 20 bp, Homo sapiens
  source 1..20: mol_type = genomic DNA
gctggaggttcactggctag

SEQ ID NO: 162521 - DNA, 20 bp, Homo sapiens
  source 1..20: mol_type = genomic DNA
ctggaggttcactggctaga

SEQ ID NO: 162522 - DNA, 20 bp, Homo sapiens
  source 1..20: mol_type = genomic DNA
tggaggttcactggctagaa

SEQ ID NO: 162523 - DNA, 20 bp, Homo sapiens
  source 1..20: mol_type = genomic DNA
ggaggttcactggctagaaa

SEQ ID NO: 162524 - DNA, 20 bp, Homo sapiens
  source 1..20: mol_type = genomic DNA
gaggttcactggctagaaag

SEQ ID NO: 162525 - DNA, 20 bp, Homo sapiens
  source 1..20: mol_type = genomic DNA
aggttcactggctagaaagt

SEQ ID NO: 162526 - DNA, 20 bp, Homo sapiens
  source 1..20: mol_type = genomic DNA
ggttcactggctagaaagtg

SEQ ID NO: 162527 - DNA, 20 bp, Homo sapiens
  source 1..20: mol_type = genomic DNA
gttcactggctagaaagtgg

SEQ ID NO: 162528 - DNA, 20 bp, Homo sapiens
  source 1..20: mol_type = genomic DNA
ttcactggctagaaagtggt

SEQ ID NO: 162529 - DNA, 20 bp, Homo sapiens
  source 1..20: mol_type = genomic DNA
tcactggctagaaagtggtc

SEQ ID NO: 162530 - DNA, 20 bp, Homo sapiens
  source 1..20: mol_type = genomic DNA
cactggctagaaagtggtca

SEQ ID NO: 162531 - DNA, 20 bp, Homo sapiens
  source 1..20: mol_type = genomic DNA
actggctagaaagtggtcag

SEQ ID NO: 162532 - DNA, 20 bp, Homo sapiens
  source 1..20: mol_type = genomic DNA
ctggctagaaagtggtcagc

SEQ ID NO: 162533 - DNA, 20 bp, Homo sapiens
  source 1..20: mol_type = genomic DNA
tggctagaaagtggtcagcc

SEQ ID NO: 162534 - DNA, 20 bp, Homo sapiens
  source 1..20: mol_type = genomic DNA
ggctagaaagtggtcagcct

SEQ ID NO: 162535 - DNA, 20 bp, Homo sapiens
  source 1..20: mol_type = genomic DNA
gctagaaagtggtcagcctg

SEQ ID NO: 162536 - DNA, 20 bp, Homo sapiens
  source 1..20: mol_type = genomic DNA
ctagaaagtggtcagcctgg

SEQ ID NO: 162537 - DNA, 20 bp, Homo sapiens
  source 1..20: mol_type = genomic DNA
tagaaagtggtcagcctggg

SEQ ID NO: 162538 - DNA, 20 bp, Homo sapiens
  source 1..20: mol_type = genomic DNA
agaaagtggtcagcctggga

SEQ ID NO: 162539 - DNA, 20 bp, Homo sapiens
  source 1..20: mol_type = genomic DNA
gaaagtggtcagcctgggat

SEQ ID NO: 162540 - DNA, 20 bp, Homo sapiens
  source 1..20: mol_type = genomic DNA
aaagtggtcagcctgggatt

SEQ ID NO: 162541 - DNA, 20 bp, Homo sapiens
  source 1..20: mol_type = genomic DNA
aagtggtcagcctgggattt

SEQ ID NO: 162542 - DNA, 20 bp, Homo sapiens
  source 1..20: mol_type = genomic DNA
agtggtcagcctgggatttg

SEQ ID NO: 162543 - DNA, 20 bp, Homo sapiens
  source 1..20: mol_type = genomic DNA
gtggtcagcctgggatttgg

SEQ ID NO: 162544 - DNA, 20 bp, Homo sapiens
  source 1..20: mol_type = genomic DNA
tggtcagcctgggatttgga

SEQ ID NO: 162545 - DNA, 20 bp, Homo sapiens
  source 1..20: mol_type = genomic DNA
ggtcagcctgggatttggac

SEQ ID NO: 162546 - DNA, 20 bp, Homo sapiens
  source 1..20: mol_type = genomic DNA
gtcagcctgggatttggaca

SEQ ID NO: 162547 - DNA, 20 bp, Homo sapiens
  source 1..20: mol_type = genomic DNA
tcagcctgggatttggacac

SEQ ID NO: 162548 - DNA, 20 bp, Homo sapiens
  source 1..20: mol_type = genomic DNA
cagcctgggatttggacaca

SEQ ID NO: 162549 - DNA, 20 bp, Homo sapiens
  source 1..20: mol_type = genomic DNA
agcctgggatttggacacag

SEQ ID NO: 162550 - DNA, 20 bp, Homo sapiens
  source 1..20: mol_type = genomic DNA
gcctgggatttggacacaga

SEQ ID NO: 162551 - DNA, 20 bp, Homo sapiens
  source 1..20: mol_type = genomic DNA
cctgggatttggacacagat

SEQ ID NO: 162552 - DNA, 20 bp, Homo sapiens
  source 1..20: mol_type = genomic DNA
ctgggatttggacacagatt

SEQ ID NO: 162553 - DNA, 20 bp, Homo sapiens
  source 1..20: mol_type = genomic DNA
tgggatttggacacagattt

SEQ ID NO: 162554 - DNA, 20 bp, Homo sapiens
  source 1..20: mol_type = genomic DNA
gggatttggacacagatttt

SEQ ID NO: 162555 - DNA, 20 bp, Homo sapiens
  source 1..20: mol_type = genomic DNA
ggatttggacacagattttt

SEQ ID NO: 162556 - DNA, 20 bp, Homo sapiens
  source 1..20: mol_type = genomic DNA
gatttggacacagatttttc

SEQ ID NO: 162557 - DNA, 20 bp, Homo sapiens
  source 1..20: mol_type = genomic DNA
atttggacacagatttttcc

SEQ ID NO: 162558 - DNA, 20 bp, Homo sapiens
  source 1..20: mol_type = genomic DNA
tttggacacagatttttcca

SEQ ID NO: 162559 - DNA, 20 bp, Homo sapiens
  source 1..20: mol_type = genomic DNA
ttggacacagatttttccac

SEQ ID NO: 162560 - DNA, 20 bp, Homo sapiens
  source 1..20: mol_type = genomic DNA
tggacacagatttttccact

SEQ ID NO: 162561 - DNA, 20 bp, Homo sapiens
  source 1..20: mol_type = genomic DNA
ggacacagatttttccactc

SEQ ID NO: 162562 - DNA, 20 bp, Homo sapiens
  source 1..20: mol_type = genomic DNA
gacacagatttttccactcc

SEQ ID NO: 162563 - DNA, 20 bp, Homo sapiens
  source 1..20: mol_type = genomic DNA
acacagatttttccactccc

SEQ ID NO: 162564 - DNA, 20 bp, Homo sapiens
  source 1..20: mol_type = genomic DNA
cacagatttttccactccca

SEQ ID NO: 162565 - DNA, 20 bp, Homo sapiens
  source 1..20: mol_type = genomic DNA
acagatttttccactcccaa

SEQ ID NO: 162566 - DNA, 20 bp, Homo sapiens
  source 1..20: mol_type = genomic DNA
cagatttttccactcccaag

SEQ ID NO: 162567 - DNA, 20 bp, Homo sapiens
  source 1..20: mol_type = genomic DNA
agatttttccactcccaagt

SEQ ID NO: 162568 - DNA, 20 bp, Homo sapiens
  source 1..20: mol_type = genomic DNA
gatttttccactcccaagtc

SEQ ID NO: 162569 - DNA, 20 bp, Homo sapiens
  source 1..20: mol_type = genomic DNA
atttttccactcccaagtct

SEQ ID NO: 162570 - DNA, 20 bp, Homo sapiens
  source 1..20: mol_type = genomic DNA
tttttccactcccaagtctg

SEQ ID NO: 162571 - DNA, 20 bp, Homo sapiens
  source 1..20: mol_type = genomic DNA
ttttccactcccaagtctgg

SEQ ID NO: 162572 - DNA, 20 bp, Homo sapiens
  source 1..20: mol_type = genomic DNA
tttccactcccaagtctggc

SEQ ID NO: 162573 - DNA, 20 bp, Homo sapiens
  source 1..20: mol_type = genomic DNA
ttccactcccaagtctggct

SEQ ID NO: 162574 - DNA, 20 bp, Homo sapiens
  source 1..20: mol_type = genomic DNA
tccactcccaagtctggctg

SEQ ID NO: 162575 - DNA, 20 bp, Homo sapiens
  source 1..20: mol_type = genomic DNA
ccactcccaagtctggctgc

SEQ ID NO: 162576 - DNA, 20 bp, Homo sapiens
  source 1..20: mol_type = genomic DNA
cactcccaagtctggctgct

SEQ ID NO: 162577 - DNA, 20 bp, Homo sapiens
  source 1..20: mol_type = genomic DNA
actcccaagtctggctgctt

SEQ ID NO: 162578 - DNA, 20 bp, Homo sapiens
  source 1..20: mol_type = genomic DNA
ctcccaagtctggctgcttt

SEQ ID NO: 162579 - DNA, 20 bp, Homo sapiens
  source 1..20: mol_type = genomic DNA
tcccaagtctggctgctttt

SEQ ID NO: 162580 - DNA, 20 bp, Homo sapiens
  source 1..20: mol_type = genomic DNA
cccaagtctggctgcttttt

SEQ ID NO: 162581 - DNA, 20 bp, Homo sapiens
  source 1..20: mol_type = genomic DNA
ccaagtctggctgcttttta

SEQ ID NO: 162582 - DNA, 20 bp, Homo sapiens
  source 1..20: mol_type = genomic DNA
caagtctggctgctttttac

SEQ ID NO: 162583 - DNA, 20 bp, Homo sapiens
  source 1..20: mol_type = genomic DNA
aagtctggctgctttttact

SEQ ID NO: 162584 - DNA, 20 bp, Homo sapiens
  source 1..20: mol_type = genomic DNA
agtctggctgctttttactt

SEQ ID NO: 162585 - DNA, 20 bp, Homo sapiens
  source 1..20: mol_type = genomic DNA
gtctggctgctttttacttc

SEQ ID NO: 162586 - DNA, 20 bp, Homo sapiens
  source 1..20: mol_type = genomic DNA
tctggctgctttttacttca

SEQ ID NO: 162587 - DNA, 20 bp, Homo sapiens
  source 1..20: mol_type = genomic DNA
ctggctgctttttacttcac

SEQ ID NO: 162588 - DNA, 20 bp, Homo sapiens
  source 1..20: mol_type = genomic DNA
tggctgctttttacttcact

SEQ ID NO: 162589 - DNA, 20 bp, Homo sapiens
  source 1..20: mol_type = genomic DNA
ggctgctttttacttcactg

SEQ ID NO: 162590 - DNA, 20 bp, Homo sapiens
  source 1..20: mol_type = genomic DNA
gctgctttttacttcactgt

SEQ ID NO: 162591 - DNA, 20 bp, Homo sapiens
  source 1..20: mol_type = genomic DNA
ctgctttttacttcactgtg

SEQ ID NO: 162592 - DNA, 20 bp, Homo sapiens
  source 1..20: mol_type = genomic DNA
tgctttttacttcactgtga

SEQ ID NO: 162593 - DNA, 20 bp, Homo sapiens
  source 1..20: mol_type = genomic DNA
gctttttacttcactgtgag

SEQ ID NO: 162594 - DNA, 20 bp, Homo sapiens
  source 1..20: mol_type = genomic DNA
ctttttacttcactgtgagg

SEQ ID NO: 162595 - DNA, 20 bp, Homo sapiens
  source 1..20: mol_type = genomic DNA
tttttacttcactgtgaggg

SEQ ID NO: 162596 - DNA, 20 bp, Homo sapiens
  source 1..20: mol_type = genomic DNA
ttttacttcactgtgagggg

SEQ ID NO: 162597 - DNA, 20 bp, Homo sapiens
  source 1..20: mol_type = genomic DNA
tttacttcactgtgaggggt

SEQ ID NO: 162598 - DNA, 20 bp, Homo sapiens
  source 1..20: mol_type = genomic DNA
ttacttcactgtgaggggta

SEQ ID NO: 162599 - DNA, 20 bp, Homo sapiens
  source 1..20: mol_type = genomic DNA
tacttcactgtgaggggtaa

SEQ ID NO: 162600 - DNA, 20 bp, Homo sapiens
  source 1..20: mol_type = genomic DNA
acttcactgtgaggggtaaa

SEQ ID NO: 162601 - DNA, 20 bp, Homo sapiens
  source 1..20: mol_type = genomic DNA
cttcactgtgaggggtaaag

SEQ ID NO: 162602 - DNA, 20 bp, Homo sapiens
  source 1..20: mol_type = genomic DNA
ttcactgtgaggggtaaagg

SEQ ID NO: 162603 - DNA, 20 bp, Homo sapiens
  source 1..20: mol_type = genomic DNA
tcactgtgaggggtaaaggt

SEQ ID NO: 162604 - DNA, 20 bp, Homo sapiens
  source 1..20: mol_type = genomic DNA
cactgtgaggggtaaaggta

SEQ ID NO: 162605 - DNA, 20 bp, Homo sapiens
  source 1..20: mol_type = genomic DNA
actgtgaggggtaaaggtaa

SEQ ID NO: 162606 - DNA, 20 bp, Homo sapiens
  source 1..20: mol_type = genomic DNA
ctgtgaggggtaaaggtaaa

SEQ ID NO: 162607 - DNA, 20 bp, Homo sapiens
  source 1..20: mol_type = genomic DNA
tgtgaggggtaaaggtaaat

SEQ ID NO: 162608 - DNA, 20 bp, Homo sapiens
  source 1..20: mol_type = genomic DNA
gtgaggggtaaaggtaaatc

SEQ ID NO: 162609 - DNA, 20 bp, Homo sapiens
  source 1..20: mol_type = genomic DNA
tgaggggtaaaggtaaatca

SEQ ID NO: 162610 - DNA, 20 bp, Homo sapiens
  source 1..20: mol_type = genomic DNA
gaggggtaaaggtaaatcag

SEQ ID NO: 162611 - DNA, 20 bp, Homo sapiens
  source 1..20: mol_type = genomic DNA
aggggtaaaggtaaatcagc

SEQ ID NO: 162612 - DNA, 20 bp, Homo sapiens
  source 1..20: mol_type = genomic DNA
ggggtaaaggtaaatcagct

SEQ ID NO: 162613 - DNA, 20 bp, Homo sapiens
  source 1..20: mol_type = genomic DNA
gggtaaaggtaaatcagctg

SEQ ID NO: 162614 - DNA, 20 bp, Homo sapiens
  source 1..20: mol_type = genomic DNA
ggtaaaggtaaatcagctgt

SEQ ID NO: 162615 - DNA, 20 bp, Homo sapiens
  source 1..20: mol_type = genomic DNA
gtaaaggtaaatcagctgtt

SEQ ID NO: 162616 - DNA, 20 bp, Homo sapiens
  source 1..20: mol_type = genomic DNA
taaaggtaaatcagctgttt

SEQ ID NO: 162617 - DNA, 20 bp, Homo sapiens
  source 1..20: mol_type = genomic DNA
aaaggtaaatcagctgtttt

SEQ ID NO: 162618 - DNA, 20 bp, Homo sapiens
  source 1..20: mol_type = genomic DNA
aaggtaaatcagctgttttc

SEQ ID NO: 162619 - DNA, 20 bp, Homo sapiens
  source 1..20: mol_type = genomic DNA
aggtaaatcagctgttttct

SEQ ID NO: 162620 - DNA, 20 bp, Homo sapiens
  source 1..20: mol_type = genomic DNA
ggtaaatcagctgttttctt

SEQ ID NO: 162621 - DNA, 20 bp, Homo sapiens
  source 1..20: mol_type = genomic DNA
gtaaatcagctgttttcttt

SEQ ID NO: 162622 - DNA, 20 bp, Homo sapiens
  source 1..20: mol_type = genomic DNA
taaatcagctgttttctttg

SEQ ID NO: 162623 - DNA, 20 bp, Homo sapiens
  source 1..20: mol_type = genomic DNA
aaatcagctgttttctttgt

SEQ ID NO: 162624 - DNA, 20 bp, Homo sapiens
  source 1..20: mol_type = genomic DNA
aatcagctgttttctttgtt

SEQ ID NO: 162625 - DNA, 20 bp, Homo sapiens
  source 1..20: mol_type = genomic DNA
atcagctgttttctttgttc

SEQ ID NO: 162626 - DNA, 20 bp, Homo sapiens
  source 1..20: mol_type = genomic DNA
tcagctgttttctttgttca

SEQ ID NO: 162627 - DNA, 20 bp, Homo sapiens
  source 1..20: mol_type = genomic DNA
cagctgttttctttgttcag

SEQ ID NO: 162628 - DNA, 20 bp, Homo sapiens
  source 1..20: mol_type = genomic DNA
agctgttttctttgttcaga

SEQ ID NO: 162629 - DNA, 20 bp, Homo sapiens
  source 1..20: mol_type = genomic DNA
gctgttttctttgttcagaa

SEQ ID NO: 162630 - DNA, 20 bp, Homo sapiens
  source 1..20: mol_type = genomic DNA
ctgttttctttgttcagaaa

SEQ ID NO: 162631 - DNA, 20 bp, Homo sapiens
  source 1..20: mol_type = genomic DNA
tgttttctttgttcagaaac

SEQ ID NO: 162632 - DNA, 20 bp, Homo sapiens
  source 1..20: mol_type = genomic DNA
gttttctttgttcagaaact

SEQ ID NO: 162633 - DNA, 20 bp, Homo sapiens
  source 1..20: mol_type = genomic DNA
ttttctttgttcagaaactc

SEQ ID NO: 162634 - DNA, 20 bp, Homo sapiens
  source 1..20: mol_type = genomic DNA
tttctttgttcagaaactct

SEQ ID NO: 162635 - DNA, 20 bp, Homo sapiens
  source 1..20: mol_type = genomic DNA
ttctttgttcagaaactctc

SEQ ID NO: 162636 - DNA, 20 bp, Homo sapiens
  source 1..20: mol_type = genomic DNA
tctttgttcagaaactctct

SEQ ID NO: 162637 - DNA, 20 bp, Homo sapiens
  source 1..20: mol_type = genomic DNA
ctttgttcagaaactctctc

SEQ ID NO: 162638 - DNA, 20 bp, Homo sapiens
  source 1..20: mol_type = genomic DNA
tttgttcagaaactctctcc

SEQ ID NO: 162639 - DNA, 20 bp, Homo sapiens
  source 1..20: mol_type = genomic DNA
ttgttcagaaactctctcca

SEQ ID NO: 162640 - DNA, 20 bp, Homo sapiens
  source 1..20: mol_type = genomic DNA
tgttcagaaactctctccaa

SEQ ID NO: 162641 - DNA, 20 bp, Homo sapiens
  source 1..20: mol_type = genomic DNA
gttcagaaactctctccaac

SEQ ID NO: 162642 - DNA, 20 bp, Homo sapiens
  source 1..20: mol_type = genomic DNA
ttcagaaactctctccaact

SEQ ID NO: 162643 - DNA, 20 bp, Homo sapiens
  source 1..20: mol_type = genomic DNA
tcagaaactctctccaactt

SEQ ID NO: 162644 - DNA, 20 bp, Homo sapiens
  source 1..20: mol_type = genomic DNA
cagaaactctctccaacttt

SEQ ID NO: 162645 - DNA, 20 bp, Homo sapiens
  source 1..20: mol_type = genomic DNA
agaaactctctccaactttg

SEQ ID NO: 162646 - DNA, 20 bp, Homo sapiens
  source 1..20: mol_type = genomic DNA
gaaactctctccaactttgc

SEQ ID NO: 162647 - DNA, 20 bp, Homo sapiens
  source 1..20: mol_type = genomic DNA
aaactctctccaactttgca

SEQ ID NO: 162648 - DNA, 20 bp, Homo sapiens
  source 1..20: mol_type = genomic DNA
aactctctccaactttgcac

SEQ ID NO: 162649 - DNA, 20 bp, Homo sapiens
  source 1..20: mol_type = genomic DNA
actctctccaactttgcact

SEQ ID NO: 162650 - DNA, 20 bp, Homo sapiens
  source 1..20: mol_type = genomic DNA
ctctctccaactttgcactt

SEQ ID NO: 162651 - DNA, 20 bp, Homo sapiens
  source 1..20: mol_type = genomic DNA
tctctccaactttgcacttt

SEQ ID NO: 162652 - DNA, 20 bp, Homo sapiens
  source 1..20: mol_type = genomic DNA
ctctccaactttgcactttt

SEQ ID NO: 162653 - DNA, 20 bp, Homo sapiens
  source 1..20: mol_type = genomic DNA
tctccaactttgcacttttc

SEQ ID NO: 162654 - DNA, 20 bp, Homo sapiens
  source 1..20: mol_type = genomic DNA
ctccaactttgcacttttct

SEQ ID NO: 162655 - DNA, 20 bp, Homo sapiens
  source 1..20: mol_type = genomic DNA
tccaactttgcacttttctt

SEQ ID NO: 162656 - DNA, 20 bp, Homo sapiens
  source 1..20: mol_type = genomic DNA
ccaactttgcacttttctta

SEQ ID NO: 162657 - DNA, 20 bp, Homo sapiens
  source 1..20: mol_type = genomic DNA
caactttgcacttttcttaa

SEQ ID NO: 162658 - DNA, 20 bp, Homo sapiens
  source 1..20: mol_type = genomic DNA
aactttgcacttttcttaaa

SEQ ID NO: 162659 - DNA, 20 bp, Homo sapiens
  source 1..20: mol_type = genomic DNA
actttgcacttttcttaaag

SEQ ID NO: 162660 - DNA, 20 bp, Homo sapiens
  source 1..20: mol_type = genomic DNA
ctttgcacttttcttaaagg

SEQ ID NO: 162661 - DNA, 20 bp, Homo sapiens
  source 1..20: mol_type = genomic DNA
tttgcacttttcttaaagga

SEQ ID NO: 162662 - DNA, 20 bp, Homo sapiens
  source 1..20: mol_type = genomic DNA
ttgcacttttcttaaaggaa

SEQ ID NO: 162663 - DNA, 20 bp, Homo sapiens
  source 1..20: mol_type = genomic DNA
tgcacttttcttaaaggaaa

SEQ ID NO: 162664 - DNA, 20 bp, Homo sapiens
  source 1..20: mol_type = genomic DNA
gcacttttcttaaaggaaag

SEQ ID NO: 162665 - DNA, 20 bp, Homo sapiens
  source 1..20: mol_type = genomic DNA
cacttttcttaaaggaaagt

SEQ ID NO: 162666 - DNA, 20 bp, Homo sapiens
  source 1..20: mol_type = genomic DNA
acttttcttaaaggaaagta

SEQ ID NO: 162667 - DNA, 20 bp, Homo sapiens
  source 1..20: mol_type = genomic DNA
cttttcttaaaggaaagtaa

SEQ ID NO: 162668 - DNA, 20 bp, Homo sapiens
  source 1..20: mol_type = genomic DNA
ttttcttaaaggaaagtaat

SEQ ID NO: 162669 - DNA, 20 bp, Homo sapiens
  source 1..20: mol_type = genomic DNA
tttcttaaaggaaagtaatg

SEQ ID NO: 162670 - DNA, 20 bp, Homo sapiens
  source 1..20: mol_type = genomic DNA
ttcttaaaggaaagtaatgg

SEQ ID NO: 162671 - DNA, 20 bp, Homo sapiens
  source 1..20: mol_type = genomic DNA
tcttaaaggaaagtaatgga

SEQ ID NO: 162672 - DNA, 20 bp, Homo sapiens
  source 1..20: mol_type = genomic DNA
cttaaaggaaagtaatggac

SEQ ID NO: 162673 - DNA, 20 bp, Homo sapiens
  source 1..20: mol_type = genomic DNA
ttaaaggaaagtaatggacc

SEQ ID NO: 162674 - DNA, 20 bp, Homo sapiens
  source 1..20: mol_type = genomic DNA
taaaggaaagtaatggacca

SEQ ID NO: 162675 - DNA, 20 bp, Homo sapiens
  source 1..20: mol_type = genomic DNA
aaaggaaagtaatggaccag

SEQ ID NO: 162676 - DNA, 20 bp, Homo sapiens
  source 1..20: mol_type = genomic DNA
aaggaaagtaatggaccagt

SEQ ID NO: 162677 - DNA, 20 bp, Homo sapiens
  source 1..20: mol_type = genomic DNA
aggaaagtaatggaccagtg

SEQ ID NO: 162678 - DNA, 20 bp, Homo sapiens
  source 1..20: mol_type = genomic DNA
ggaaagtaatggaccagtga

SEQ ID NO: 162679 - DNA, 20 bp, Homo sapiens
  source 1..20: mol_type = genomic DNA
gaaagtaatggaccagtgaa

SEQ ID NO: 162680 - DNA, 20 bp, Homo sapiens
  source 1..20: mol_type = genomic DNA
aaagtaatggaccagtgaag

SEQ ID NO: 162681 - DNA, 20 bp, Homo sapiens
  source 1..20: mol_type = genomic DNA
aagtaatggaccagtgaagg

SEQ ID NO: 162682 - DNA, 20 bp, Homo sapiens
  source 1..20: mol_type = genomic DNA
agtaatggaccagtgaaggt

SEQ ID NO: 162683 - DNA, 20 bp, Homo sapiens
  source 1..20: mol_type = genomic DNA
gtaatggaccagtgaaggtg

SEQ ID NO: 162684 - DNA, 20 bp, Homo sapiens
  source 1..20: mol_type = genomic DNA
taatggaccagtgaaggtgt

SEQ ID NO: 162685 - DNA, 20 bp, Homo sapiens
  source 1..20: mol_type = genomic DNA
aatggaccagtgaaggtgtg

SEQ ID NO: 162686 - DNA, 20 bp, Homo sapiens
  source 1..20: mol_type = genomic DNA
atggaccagtgaaggtgtgg

SEQ ID NO: 162687 - DNA, 20 bp, Homo sapiens
  source 1..20: mol_type = genomic DNA
tggaccagtgaaggtgtggg

SEQ ID NO: 162688 - DNA, 20 bp, Homo sapiens
  source 1..20: mol_type = genomic DNA
ggaccagtgaaggtgtgggg

SEQ ID NO: 162689 - DNA, 20 bp, Homo sapiens
  source 1..20: mol_type = genomic DNA
gaccagtgaaggtgtgggga

SEQ ID NO: 162690 - DNA, 20 bp, Homo sapiens
  source 1..20: mol_type = genomic DNA
accagtgaaggtgtggggaa

SEQ ID NO: 162691 - DNA, 20 bp, Homo sapiens
  source 1..20: mol_type = genomic DNA
ccagtgaaggtgtggggaag

SEQ ID NO: 162692 - DNA, 20 bp, Homo sapiens
  source 1..20: mol_type = genomic DNA
cagtgaaggtgtggggaagc

SEQ ID NO: 162693 - DNA, 20 bp, Homo sapiens
  source 1..20: mol_type = genomic DNA
agtgaaggtgtggggaagca

SEQ ID NO: 162694 - DNA, 20 bp, Homo sapiens
  source 1..20: mol_type = genomic DNA
gtgaaggtgtggggaagcat

SEQ ID NO: 162695 - DNA, 20 bp, Homo sapiens
  source 1..20: mol_type = genomic DNA
tgaaggtgtggggaagcatt

SEQ ID NO: 162696 - DNA, 20 bp, Homo sapiens
  source 1..20: mol_type = genomic DNA
gaaggtgtggggaagcatta

SEQ ID NO: 162697 - DNA, 20 bp, Homo sapiens
  source 1..20: mol_type = genomic DNA
aaggtgtggggaagcattaa

SEQ ID NO: 162698 - DNA, 20 bp, Homo sapiens
  source 1..20: mol_type = genomic DNA
aggtgtggggaagcattaaa

SEQ ID NO: 162699 - DNA, 20 bp, Homo sapiens
  source 1..20: mol_type = genomic DNA
ggtgtggggaagcattaaag

SEQ ID NO: 162700 - DNA, 20 bp, Homo sapiens
  source 1..20: mol_type = genomic DNA
gtgtggggaagcattaaagg

SEQ ID NO: 162701 - DNA, 20 bp, Homo sapiens
  source 1..20: mol_type = genomic DNA
tgtggggaagcattaaagga

SEQ ID NO: 162702 - DNA, 20 bp, Homo sapiens
  source 1..20: mol_type = genomic DNA
gtggggaagcattaaaggac

SEQ ID NO: 162703 - DNA, 20 bp, Homo sapiens
  source 1..20: mol_type = genomic DNA
tggggaagcattaaaggact

SEQ ID NO: 162704 - DNA, 20 bp, Homo sapiens
  source 1..20: mol_type = genomic DNA
ggggaagcattaaaggactg

SEQ ID NO: 162705 - DNA, 20 bp, Homo sapiens
  source 1..20: mol_type = genomic DNA
gggaagcattaaaggactga

SEQ ID NO: 162706 - DNA, 20 bp, Homo sapiens
  source 1..20: mol_type = genomic DNA
ggaagcattaaaggactgac

SEQ ID NO: 162707 - DNA, 20 bp, Homo sapiens
  source 1..20: mol_type = genomic DNA
gaagcattaaaggactgact

SEQ ID NO: 162708 - DNA, 20 bp, Homo sapiens
  source 1..20: mol_type = genomic DNA
aagcattaaaggactgactg

SEQ ID NO: 162709 - DNA, 20 bp, Homo sapiens
  source 1..20: mol_type = genomic DNA
agcattaaaggactgactga

SEQ ID NO: 162710 - DNA, 20 bp, Homo sapiens
  source 1..20: mol_type = genomic DNA
gcattaaaggactgactgaa

SEQ ID NO: 162711 - DNA, 20 bp, Homo sapiens
  source 1..20: mol_type = genomic DNA
cattaaaggactgactgaag

SEQ ID NO: 162712 - DNA, 20 bp, Homo sapiens
  source 1..20: mol_type = genomic DNA
attaaaggactgactgaagg

SEQ ID NO: 162713 - DNA, 20 bp, Homo sapiens
  source 1..20: mol_type = genomic DNA
ttaaaggactgactgaaggc

SEQ ID NO: 162714 - DNA, 20 bp, Homo sapiens
  source 1..20: mol_type = genomic DNA
taaaggactgactgaaggcc

SEQ ID NO: 162715 - DNA, 20 bp, Homo sapiens
  source 1..20: mol_type = genomic DNA
aaaggactgactgaaggcct

SEQ ID NO: 162716 - DNA, 20 bp, Homo sapiens
  source 1..20: mol_type = genomic DNA
aaggactgactgaaggcctg

SEQ ID NO: 162717 - DNA, 20 bp, Homo sapiens
  source 1..20: mol_type = genomic DNA
aggactgactgaaggcctgc

SEQ ID NO: 162718 - DNA, 20 bp, Homo sapiens
  source 1..20: mol_type = genomic DNA
ggactgactgaaggcctgca

SEQ ID NO: 162719 - DNA, 20 bp, Homo sapiens
  source 1..20: mol_type = genomic DNA
gactgactgaaggcctgcat

SEQ ID NO: 162720 - DNA, 20 bp, Homo sapiens
  source 1..20: mol_type = genomic DNA
actgactgaaggcctgcatg

SEQ ID NO: 162721 - DNA, 20 bp, Homo sapiens
  source 1..20: mol_type = genomic DNA
ctgactgaaggcctgcatgg

SEQ ID NO: 162722 - DNA, 20 bp, Homo sapiens
  source 1..20: mol_type = genomic DNA
tgactgaaggcctgcatgga

SEQ ID NO: 162723 - DNA, 20 bp, Homo sapiens
  source 1..20: mol_type = genomic DNA
gactgaaggcctgcatggat

SEQ ID NO: 162724 - DNA, 20 bp, Homo sapiens
  source 1..20: mol_type = genomic DNA
actgaaggcctgcatggatt

SEQ ID NO: 162725 - DNA, 20 bp, Homo sapiens
  source 1..20: mol_type = genomic DNA
ctgaaggcctgcatggattc

SEQ ID NO: 162726 - DNA, 20 bp, Homo sapiens
  source 1..20: mol_type = genomic DNA
tgaaggcctgcatggattcc

SEQ ID NO: 162727 - DNA, 20 bp, Homo sapiens
  source 1..20: mol_type = genomic DNA
gaaggcctgcatggattcca

SEQ ID NO: 162728 - DNA, 20 bp, Homo sapiens
  source 1..20: mol_type = genomic DNA
aaggcctgcatggattccat

SEQ ID NO: 162729 - DNA, 20 bp, Homo sapiens
  source 1..20: mol_type = genomic DNA
aggcctgcatggattccatg

SEQ ID NO: 162730 - DNA, 20 bp, Homo sapiens
  source 1..20: mol_type = genomic DNA
ggcctgcatggattccatgt

SEQ ID NO: 162731 - DNA, 20 bp, Homo sapiens
  source 1..20: mol_type = genomic DNA
gcctgcatggattccatgtt

SEQ ID NO: 162732 - DNA, 20 bp, Homo sapiens
  source 1..20: mol_type = genomic DNA
cctgcatggattccatgttc

SEQ ID NO: 162733 - DNA, 20 bp, Homo sapiens
  source 1..20: mol_type = genomic DNA
ctgcatggattccatgttca

SEQ ID NO: 162734 - DNA, 20 bp, Homo sapiens
  source 1..20: mol_type = genomic DNA
tgcatggattccatgttcat

SEQ ID NO: 162735 - DNA, 20 bp, Homo sapiens
  source 1..20: mol_type = genomic DNA
gcatggattccatgttcatg

SEQ ID NO: 162736 - DNA, 20 bp, Homo sapiens
  source 1..20: mol_type = genomic DNA
catggattccatgttcatga

SEQ ID NO: 162737 - DNA, 20 bp, Homo sapiens
  source 1..20: mol_type = genomic DNA
atggattccatgttcatgag

SEQ ID NO: 162738 - DNA, 20 bp, Homo sapiens
  source 1..20: mol_type = genomic DNA
tggattccatgttcatgagt

SEQ ID NO: 162739 - DNA, 20 bp, Homo sapiens
  source 1..20: mol_type = genomic DNA
ggattccatgttcatgagtt

SEQ ID NO: 162740 - DNA, 20 bp, Homo sapiens
  source 1..20: mol_type = genomic DNA
gattccatgttcatgagttt

SEQ ID NO: 162741 - DNA, 20 bp, Homo sapiens
  source 1..20: mol_type = genomic DNA
attccatgttcatgagtttg

SEQ ID NO: 162742 - DNA, 20 bp, Homo sapiens
  source 1..20: mol_type = genomic DNA
ttccatgttcatgagtttgg

SEQ ID NO: 162743 - DNA, 20 bp, Homo sapiens
  source 1..20: mol_type = genomic DNA
tccatgttcatgagtttgga

SEQ ID NO: 162744 - DNA, 20 bp, Homo sapiens
  source 1..20: mol_type = genomic DNA
ccatgttcatgagtttggag

SEQ ID NO: 162745 - DNA, 20 bp, Homo sapiens
  source 1..20: mol_type = genomic DNA
catgttcatgagtttggaga

SEQ ID NO: 162746 - DNA, 20 bp, Homo sapiens
  source 1..20: mol_type = genomic DNA
atgttcatgagtttggagat

SEQ ID NO: 162747 - DNA, 20 bp, Homo sapiens
  source 1..20: mol_type = genomic DNA
tgttcatgagtttggagata

SEQ ID NO: 162748 - DNA, 20 bp, Homo sapiens
  source 1..20: mol_type = genomic DNA
gttcatgagtttggagataa

SEQ ID NO: 162749 - DNA, 20 bp, Homo sapiens
  source 1..20: mol_type = genomic DNA
ttcatgagtttggagataat

SEQ ID NO: 162750 - DNA, 20 bp, Homo sapiens
  source 1..20: mol_type = genomic DNA
tcatgagtttggagataata

SEQ ID NO: 162751 - DNA, 20 bp, Homo sapiens
  source 1..20: mol_type = genomic DNA
catgagtttggagataatac

SEQ ID NO: 162752 - DNA, 20 bp, Homo sapiens
  source 1..20: mol_type = genomic DNA
atgagtttggagataataca

SEQ ID NO: 162753 - DNA, 20 bp, Homo sapiens
  source 1..20: mol_type = genomic DNA
tgagtttggagataatacag

SEQ ID NO: 162754 - DNA, 20 bp, Homo sapiens
  source 1..20: mol_type = genomic DNA
gagtttggagataatacagc

SEQ ID NO: 162755 - DNA, 20 bp, Homo sapiens
  source 1..20: mol_type = genomic DNA
agtttggagataatacagca

SEQ ID NO: 162756 - DNA, 20 bp, Homo sapiens
  source 1..20: mol_type = genomic DNA
gtttggagataatacagcag

SEQ ID NO: 162757 - DNA, 20 bp, Homo sapiens
  source 1..20: mol_type = genomic DNA
tttggagataatacagcagg

SEQ ID NO: 162758 - DNA, 20 bp, Homo sapiens
  source 1..20: mol_type = genomic DNA
ttggagataatacagcaggt

SEQ ID NO: 162759 - DNA, 20 bp, Homo sapiens
  source 1..20: mol_type = genomic DNA
tggagataatacagcaggtg

SEQ ID NO: 162760 - DNA, 20 bp, Homo sapiens
  source 1..20: mol_type = genomic DNA
ggagataatacagcaggtgg

SEQ ID NO: 162761 - DNA, 20 bp, Homo sapiens
  source 1..20: mol_type = genomic DNA
gagataatacagcaggtggg

SEQ ID NO: 162762 - DNA, 20 bp, Homo sapiens
  source 1..20: mol_type = genomic DNA
agataatacagcaggtgggt

SEQ ID NO: 162763 - DNA, 20 bp, Homo sapiens
  source 1..20: mol_type = genomic DNA
gataatacagcaggtgggtg

SEQ ID NO: 162764 - DNA, 20 bp, Homo sapiens
  source 1..20: mol_type = genomic DNA
ataatacagcaggtgggtgt

SEQ ID NO: 162765 - DNA, 20 bp, Homo sapiens
  source 1..20: mol_type = genomic DNA
taatacagcaggtgggtgtt

SEQ ID NO: 162766 - DNA, 20 bp, Homo sapiens
  source 1..20: mol_type = genomic DNA
aatacagcaggtgggtgttg

SEQ ID NO: 162767 - DNA, 20 bp, Homo sapiens
  source 1..20: mol_type = genomic DNA
atacagcaggtgggtgttgt

SEQ ID NO: 162768 - DNA, 20 bp, Homo sapiens
  source 1..20: mol_type = genomic DNA
tacagcaggtgggtgttgtg

SEQ ID NO: 162769 - DNA, 20 bp, Homo sapiens
  source 1..20: mol_type = genomic DNA
acagcaggtgggtgttgtgc

SEQ ID NO: 162770 - DNA, 20 bp, Homo sapiens
  source 1..20: mol_type = genomic DNA
cagcaggtgggtgttgtgct

SEQ ID NO: 162771 - DNA, 20 bp, Homo sapiens
  source 1..20: mol_type = genomic DNA
agcaggtgggtgttgtgctg

SEQ ID NO: 162772 - DNA, 20 bp, Homo sapiens
  source 1..20: mol_type = genomic DNA
gcaggtgggtgttgtgctgt

SEQ ID NO: 162773 - DNA, 20 bp, Homo sapiens
  source 1..20: mol_type = genomic DNA
caggtgggtgttgtgctgtg

SEQ ID NO: 162774 - DNA, 20 bp, Homo sapiens
  source 1..20: mol_type = genomic DNA
aggtgggtgttgtgctgtgc

SEQ ID NO: 162775 - DNA, 20 bp, Homo sapiens
  source 1..20: mol_type = genomic DNA
ggtgggtgttgtgctgtgct

SEQ ID NO: 162776 - DNA, 20 bp, Homo sapiens
  source 1..20: mol_type = genomic DNA
gtgggtgttgtgctgtgctg

SEQ ID NO: 162777 - DNA, 20 bp, Homo sapiens
  source 1..20: mol_type = genomic DNA
tgggtgttgtgctgtgctgg

SEQ ID NO: 162778 - DNA, 20 bp, Homo sapiens
  source 1..20: mol_type = genomic DNA
gggtgttgtgctgtgctggt

SEQ ID NO: 162779 - DNA, 20 bp, Homo sapiens
  source 1..20: mol_type = genomic DNA
ggtgttgtgctgtgctggtg

SEQ ID NO: 162780 - DNA, 20 bp, Homo sapiens
  source 1..20: mol_type = genomic DNA
gtgttgtgctgtgctggtga

SEQ ID NO: 162781 - DNA, 20 bp, Homo sapiens
  source 1..20: mol_type = genomic DNA
tgttgtgctgtgctggtgac

SEQ ID NO: 162782 - DNA, 20 bp, Homo sapiens
  source 1..20: mol_type = genomic DNA
gttgtgctgtgctggtgacc

SEQ ID NO: 162783 - DNA, 20 bp, Homo sapiens
  source 1..20: mol_type = genomic DNA
ttgtgctgtgctggtgaccc

SEQ ID NO: 162784 - DNA, 20 bp, Homo sapiens
  source 1..20: mol_type = genomic DNA
tgtgctgtgctggtgaccca

SEQ ID NO: 162785 - DNA, 20 bp, Homo sapiens
  source 1..20: mol_type = genomic DNA
gtgctgtgctggtgacccat

SEQ ID NO: 162786 - DNA, 20 bp, Homo sapiens
  source 1..20: mol_type = genomic DNA
tgctgtgctggtgacccata

SEQ ID NO: 162787 - DNA, 20 bp, Homo sapiens
  source 1..20: mol_type = genomic DNA
gctgtgctggtgacccatac

SEQ ID NO: 162788 - DNA, 20 bp, Homo sapiens
  source 1..20: mol_type = genomic DNA
ctgtgctggtgacccatact

SEQ ID NO: 162789 - DNA, 20 bp, Homo sapiens
  source 1..20: mol_type = genomic DNA
tgtgctggtgacccatactt

SEQ ID NO: 162790 - DNA, 20 bp, Homo sapiens
  source 1..20: mol_type = genomic DNA
gtgctggtgacccatacttg

SEQ ID NO: 162791 - DNA, 20 bp, Homo sapiens
  source 1..20: mol_type = genomic DNA
tgctggtgacccatacttgt

SEQ ID NO: 162792 - DNA, 20 bp, Homo sapiens
  source 1..20: mol_type = genomic DNA
gctggtgacccatacttgtt

SEQ ID NO: 162793 - DNA, 20 bp, Homo sapiens
  source 1..20: mol_type = genomic DNA
ctggtgacccatacttgttc

SEQ ID NO: 162794 - DNA, 20 bp, Homo sapiens
  source 1..20: mol_type = genomic DNA
tggtgacccatacttgttca

SEQ ID NO: 162795 - DNA, 20 bp, Homo sapiens
  source 1..20: mol_type = genomic DNA
ggtgacccatacttgttcac

SEQ ID NO: 162796 - DNA, 20 bp, Homo sapiens
  source 1..20: mol_type = genomic DNA
gtgacccatacttgttcacc

SEQ ID NO: 162797 - DNA, 20 bp, Homo sapiens
  source 1..20: mol_type = genomic DNA
tgacccatacttgttcaccc

SEQ ID NO: 162798 - DNA, 20 bp, Homo sapiens
  source 1..20: mol_type = genomic DNA
gacccatacttgttcaccct

SEQ ID NO: 162799 - DNA, 20 bp, Homo sapiens
  source 1..20: mol_type = genomic DNA
acccatacttgttcacccta

SEQ ID NO: 162800 - DNA, 20 bp, Homo sapiens
  source 1..20: mol_type = genomic DNA
cccatacttgttcaccctag

SEQ ID NO: 162801 - DNA, 20 bp, Homo sapiens
  source 1..20: mol_type = genomic DNA
ccatacttgttcaccctagt

SEQ ID NO: 162802 - DNA, 20 bp, Homo sapiens
  source 1..20: mol_type = genomic DNA
catacttgttcaccctagtt

SEQ ID NO: 162803 - DNA, 20 bp, Homo sapiens
  source 1..20: mol_type = genomic DNA
atacttgttcaccctagtta

SEQ ID NO: 162804 - DNA, 20 bp, Homo sapiens
  source 1..20: mol_type = genomic DNA
tacttgttcaccctagttag

SEQ ID NO: 162805 - DNA, 20 bp, Homo sapiens
  source 1..20: mol_type = genomic DNA
acttgttcaccctagttaga

SEQ ID NO: 162806 - DNA, 20 bp, Homo sapiens
  source 1..20: mol_type = genomic DNA
cttgttcaccctagttagat

SEQ ID NO: 162807 - DNA, 20 bp, Homo sapiens
  source 1..20: mol_type = genomic DNA
ttgttcaccctagttagata

SEQ ID NO: 162808 - DNA, 20 bp, Homo sapiens
  source 1..20: mol_type = genomic DNA
tgttcaccctagttagataa

SEQ ID NO: 162809 - DNA, 20 bp, Homo sapiens
  source 1..20: mol_type = genomic DNA
gttcaccctagttagataaa

SEQ ID NO: 162810 - DNA, 20 bp, Homo sapiens
  source 1..20: mol_type = genomic DNA
ttcaccctagttagataaac

SEQ ID NO: 162811 - DNA, 20 bp, Homo sapiens
  source 1..20: mol_type = genomic DNA
tcaccctagttagataaaca

SEQ ID NO: 162812 - DNA, 20 bp, Homo sapiens
  source 1..20: mol_type = genomic DNA
caccctagttagataaacag

SEQ ID NO: 162813 - DNA, 20 bp, Homo sapiens
  source 1..20: mol_type = genomic DNA
accctagttagataaacagt

SEQ ID NO: 162814 - DNA, 20 bp, Homo sapiens
  source 1..20: mol_type = genomic DNA
ccctagttagataaacagta

SEQ ID NO: 162815 - DNA, 20 bp, Homo sapiens
  source 1..20: mol_type = genomic DNA
cctagttagataaacagtag

SEQ ID NO: 162816 - DNA, 20 bp, Homo sapiens
  source 1..20: mol_type = genomic DNA
ctagttagataaacagtaga

SEQ ID NO: 162817 - DNA, 20 bp, Homo sapiens
  source 1..20: mol_type = genomic DNA
tagttagataaacagtagag

SEQ ID NO: 162818 - DNA, 20 bp, Homo sapiens
  source 1..20: mol_type = genomic DNA
agttagataaacagtagagt

SEQ ID NO: 162819 - DNA, 20 bp, Homo sapiens
  source 1..20: mol_type = genomic DNA
gttagataaacagtagagta

SEQ ID NO: 162820 - DNA, 20 bp, Homo sapiens
  source 1..20: mol_type = genomic DNA
ttagataaacagtagagtag

SEQ ID NO: 162821 - DNA, 20 bp, Homo sapiens
  source 1..20: mol_type = genomic DNA
tagataaacagtagagtagc

SEQ ID NO: 162822 - DNA, 20 bp, Homo sapiens
  source 1..20: mol_type = genomic DNA
agataaacagtagagtagcc

SEQ ID NO: 162823 - DNA, 20 bp, Homo sapiens
  source 1..20: mol_type = genomic DNA
gataaacagtagagtagccc

SEQ ID NO: 162824 - DNA, 20 bp, Homo sapiens
  source 1..20: mol_type = genomic DNA
ataaacagtagagtagcccc

SEQ ID NO: 162825 - DNA, 20 bp, Homo sapiens
  source 1..20: mol_type = genomic DNA
taaacagtagagtagcccct

SEQ ID NO: 162826 - DNA, 20 bp, Homo sapiens
  source 1..20: mol_type = genomic DNA
aaacagtagagtagccccta

SEQ ID NO: 162827 - DNA, 20 bp, Homo sapiens
  source 1..20: mol_type = genomic DNA
aacagtagagtagcccctaa

SEQ ID NO: 162828 - DNA, 20 bp, Homo sapiens
  source 1..20: mol_type = genomic DNA
acagtagagtagcccctaaa

SEQ ID NO: 162829 - DNA, 20 bp, Homo sapiens
  source 1..20: mol_type = genomic DNA
cagtagagtagcccctaaac

SEQ ID NO: 162830 - DNA, 20 bp, Homo sapiens
  source 1..20: mol_type = genomic DNA
agtagagtagcccctaaacg

SEQ ID NO: 162831 - DNA, 20 bp, Homo sapiens
  source 1..20: mol_type = genomic DNA
gtagagtagcccctaaacgt

SEQ ID NO: 162832 - DNA, 20 bp, Homo sapiens
  source 1..20: mol_type = genomic DNA
tagagtagcccctaaacgtt

SEQ ID NO: 162833 - DNA, 20 bp, Homo sapiens
  source 1..20: mol_type = genomic DNA
agagtagcccctaaacgtta

SEQ ID NO: 162834 - DNA, 20 bp, Homo sapiens
  source 1..20: mol_type = genomic DNA
gagtagcccctaaacgttaa

SEQ ID NO: 162835 - DNA, 20 bp, Homo sapiens
  source 1..20: mol_type = genomic DNA
agtagcccctaaacgttaaa

SEQ ID NO: 162836 - DNA, 20 bp, Homo sapiens
  source 1..20: mol_type = genomic DNA
gtagcccctaaacgttaaaa

SEQ ID NO: 162837 - DNA, 20 bp, Homo sapiens
  source 1..20: mol_type = genomic DNA
tagcccctaaacgttaaaac

SEQ ID NO: 162838 - DNA, 20 bp, Homo sapiens
  source 1..20: mol_type = genomic DNA
agcccctaaacgttaaaacc

SEQ ID NO: 162839 - DNA, 20 bp, Homo sapiens
  source 1..20: mol_type = genomic DNA
gcccctaaacgttaaaaccc

SEQ ID NO: 162840 - DNA, 20 bp, Homo sapiens
  source 1..20: mol_type = genomic DNA
cccctaaacgttaaaacccc

SEQ ID NO: 162841 - DNA, 20 bp, Homo sapiens
  source 1..20: mol_type = genomic DNA
ccctaaacgttaaaacccct

SEQ ID NO: 162842 - DNA, 20 bp, Homo sapiens
  source 1..20: mol_type = genomic DNA
cctaaacgttaaaacccctc

SEQ ID NO: 162843 - DNA, 20 bp, Homo sapiens
  source 1..20: mol_type = genomic DNA
ctaaacgttaaaacccctca

SEQ ID NO: 162844 - DNA, 20 bp, Homo sapiens
  source 1..20: mol_type = genomic DNA
taaacgttaaaacccctcaa

SEQ ID NO: 162845 - DNA, 20 bp, Homo sapiens
  source 1..20: mol_type = genomic DNA
aaacgttaaaacccctcaac

SEQ ID NO: 162846 - DNA, 20 bp, Homo sapiens
  source 1..20: mol_type = genomic DNA
aacgttaaaacccctcaact

SEQ ID NO: 162847 - DNA, 20 bp, Homo sapiens
  source 1..20: mol_type = genomic DNA
acgttaaaacccctcaactt

SEQ ID NO: 162848 - DNA, 20 bp, Homo sapiens
  source 1..20: mol_type = genomic DNA
cgttaaaacccctcaacttg

SEQ ID NO: 162849 - DNA, 20 bp, Homo sapiens
  source 1..20: mol_type = genomic DNA
gttaaaacccctcaacttgt

SEQ ID NO: 162850 - DNA, 20 bp, Homo sapiens
  source 1..20: mol_type = genomic DNA
ttaaaacccctcaacttgtt

SEQ ID NO: 162851 - DNA, 20 bp, Homo sapiens
  source 1..20: mol_type = genomic DNA
taaaacccctcaacttgttt

SEQ ID NO: 162852 - DNA, 20 bp, Homo sapiens
  source 1..20: mol_type = genomic DNA
aaaacccctcaacttgtttt

SEQ ID NO: 162853 - DNA, 20 bp, Homo sapiens
  source 1..20: mol_type = genomic DNA
aaacccctcaacttgttttt

SEQ ID NO: 162854 - DNA, 20 bp, Homo sapiens
  source 1..20: mol_type = genomic DNA
aacccctcaacttgtttttg

SEQ ID NO: 162855 - DNA, 20 bp, Homo sapiens
  source 1..20: mol_type = genomic DNA
acccctcaacttgtttttgt

SEQ ID NO: 162856 - DNA, 20 bp, Homo sapiens
  source 1..20: mol_type = genomic DNA
cccctcaacttgtttttgtt

SEQ ID NO: 162857 - DNA, 20 bp, Homo sapiens
  source 1..20: mol_type = genomic DNA
ccctcaacttgtttttgttt

SEQ ID NO: 162858 - DNA, 20 bp, Homo sapiens
  source 1..20: mol_type = genomic DNA
cctcaacttgtttttgtttt

SEQ ID NO: 162859 - DNA, 20 bp, Homo sapiens
  source 1..20: mol_type = genomic DNA
ctcaacttgtttttgttttt

SEQ ID NO: 162860 - DNA, 20 bp, Homo sapiens
  source 1..20: mol_type = genomic DNA
tcaacttgtttttgtttttg

SEQ ID NO: 162861 - DNA, 20 bp, Homo sapiens
  source 1..20: mol_type = genomic DNA
caacttgtttttgtttttga

SEQ ID NO: 162862 - DNA, 20 bp, Homo sapiens
  source 1..20: mol_type = genomic DNA
aacttgtttttgtttttgag

SEQ ID NO: 162863 - DNA, 20 bp, Homo sapiens
  source 1..20: mol_type = genomic DNA
acttgtttttgtttttgaga

SEQ ID NO: 162864 - DNA, 20 bp, Homo sapiens
  source 1..20: mol_type = genomic DNA
cttgtttttgtttttgagaa

SEQ ID NO: 162865 - DNA, 20 bp, Homo sapiens
  source 1..20: mol_type = genomic DNA
ttgtttttgtttttgagaaa

SEQ ID NO: 162866 - DNA, 20 bp, Homo sapiens
  source 1..20: mol_type = genomic DNA
tgtttttgtttttgagaaag

SEQ ID NO: 162867 - DNA, 20 bp, Homo sapiens
  source 1..20: mol_type = genomic DNA
gtttttgtttttgagaaagg

SEQ ID NO: 162868 - DNA, 20 bp, Homo sapiens
  source 1..20: mol_type = genomic DNA
tttttgtttttgagaaaggg

SEQ ID NO: 162869 - DNA, 20 bp, Homo sapiens
  source 1..20: mol_type = genomic DNA
ttttgtttttgagaaagggt

SEQ ID NO: 162870 - DNA, 20 bp, Homo sapiens
  source 1..20: mol_type = genomic DNA
tttgtttttgagaaagggtc

SEQ ID NO: 162871 - DNA, 20 bp, Homo sapiens
  source 1..20: mol_type = genomic DNA
ttgtttttgagaaagggtct

SEQ ID NO: 162872 - DNA, 20 bp, Homo sapiens
  source 1..20: mol_type = genomic DNA
tgtttttgagaaagggtctt

SEQ ID NO: 162873 - DNA, 20 bp, Homo sapiens
  source 1..20: mol_type = genomic DNA
gtttttgagaaagggtcttg

SEQ ID NO: 162874 - DNA, 20 bp, Homo sapiens
  source 1..20: mol_type = genomic DNA
tttttgagaaagggtcttgc

SEQ ID NO: 162875 - DNA, 20 bp, Homo sapiens
  source 1..20: mol_type = genomic DNA
ttttgagaaagggtcttgct

SEQ ID NO: 162876 - DNA, 20 bp, Homo sapiens
  source 1..20: mol_type = genomic DNA
tttgagaaagggtcttgctc

SEQ ID NO: 162877 - DNA, 20 bp, Homo sapiens
  source 1..20: mol_type = genomic DNA
ttgagaaagggtcttgctct

SEQ ID NO: 162878 - DNA, 20 bp, Homo sapiens
  source 1..20: mol_type = genomic DNA
tgagaaagggtcttgctctg

SEQ ID NO: 162879 - DNA, 20 bp, Homo sapiens
  source 1..20: mol_type = genomic DNA
gagaaagggtcttgctctgt

SEQ ID NO: 162880 - DNA, 20 bp, Homo sapiens
  source 1..20: mol_type = genomic DNA
agaaagggtcttgctctgtc

SEQ ID NO: 162881 - DNA, 20 bp, Homo sapiens
  source 1..20: mol_type = genomic DNA
gaaagggtcttgctctgtcg

SEQ ID NO: 162882 - DNA, 20 bp, Homo sapiens
  source 1..20: mol_type = genomic DNA
aaagggtcttgctctgtcgc

SEQ ID NO: 162883 - DNA, 20 bp, Homo sapiens
  source 1..20: mol_type = genomic DNA
aagggtcttgctctgtcgct

SEQ ID NO: 162884 - DNA, 20 bp, Homo sapiens
  source 1..20: mol_type = genomic DNA
agggtcttgctctgtcgctc

SEQ ID NO: 162885 - DNA, 20 bp, Homo sapiens
  source 1..20: mol_type = genomic DNA
gggtcttgctctgtcgctca

SEQ ID NO: 162886 - DNA, 20 bp, Homo sapiens
  source 1..20: mol_type = genomic DNA
ggtcttgctctgtcgctcag

SEQ ID NO: 162887 - DNA, 20 bp, Homo sapiens
  source 1..20: mol_type = genomic DNA
gtcttgctctgtcgctcagg

SEQ ID NO: 162888 - DNA, 20 bp, Homo sapiens
  source 1..20: mol_type = genomic DNA
tcttgctctgtcgctcaggc

SEQ ID NO: 162889 - DNA, 20 bp, Homo sapiens
  source 1..20: mol_type = genomic DNA
cttgctctgtcgctcaggct

SEQ ID NO: 162890 - DNA, 20 bp, Homo sapiens
  source 1..20: mol_type = genomic DNA
ttgctctgtcgctcaggctg

SEQ ID NO: 162891 - DNA, 20 bp, Homo sapiens
  source 1..20: mol_type = genomic DNA
tgctctgtcgctcaggctgg

SEQ ID NO: 162892 - DNA, 20 bp, Homo sapiens
  source 1..20: mol_type = genomic DNA
gctctgtcgctcaggctgga

SEQ ID NO: 162893 - DNA, 20 bp, Homo sapiens
  source 1..20: mol_type = genomic DNA
ctctgtcgctcaggctggag

SEQ ID NO: 162894 - DNA, 20 bp, Homo sapiens
  source 1..20: mol_type = genomic DNA
tctgtcgctcaggctggagt

SEQ ID NO: 162895 - DNA, 20 bp, Homo sapiens
  source 1..20: mol_type = genomic DNA
ctgtcgctcaggctggagtg

SEQ ID NO: 162896 - DNA, 20 bp, Homo sapiens
  source 1..20: mol_type = genomic DNA
tgtcgctcaggctggagtgc

SEQ ID NO: 162897 - DNA, 20 bp, Homo sapiens
  source 1..20: mol_type = genomic DNA
gtcgctcaggctggagtgca

SEQ ID NO: 162898 - DNA, 20 bp, Homo sapiens
  source 1..20: mol_type = genomic DNA
tcgctcaggctggagtgcag

SEQ ID NO: 162899 - DNA, 20 bp, Homo sapiens
  source 1..20: mol_type = genomic DNA
cgctcaggctggagtgcagt

SEQ ID NO: 162900 - DNA, 20 bp, Homo sapiens
  source 1..20: mol_type = genomic DNA
gctcaggctggagtgcagtg

SEQ ID NO: 162901 - DNA, 20 bp, Homo sapiens
  source 1..20: mol_type = genomic DNA
ctcaggctggagtgcagtgg

SEQ ID NO: 162902 - DNA, 20 bp, Homo sapiens
  source 1..20: mol_type = genomic DNA
tcaggctggagtgcagtggc

SEQ ID NO: 162903 - DNA, 20 bp, Homo sapiens
  source 1..20: mol_type = genomic DNA
caggctggagtgcagtggcg

SEQ ID NO: 162904 - DNA, 20 bp, Homo sapiens
  source 1..20: mol_type = genomic DNA
aggctggagtgcagtggcgc

SEQ ID NO: 162905 - DNA, 20 bp, Homo sapiens
  source 1..20: mol_type = genomic DNA
ggctggagtgcagtggcgct

SEQ ID NO: 162906 - DNA, 20 bp, Homo sapiens
  source 1..20: mol_type = genomic DNA
gctggagtgcagtggcgctg

SEQ ID NO: 162907 - DNA, 20 bp, Homo sapiens
  source 1..20: mol_type = genomic DNA
ctggagtgcagtggcgctgt

SEQ ID NO: 162908 - DNA, 20 bp, Homo sapiens
  source 1..20: mol_type = genomic DNA
tggagtgcagtggcgctgtg

SEQ ID NO: 162909 - DNA, 20 bp, Homo sapiens
  source 1..20: mol_type = genomic DNA
ggagtgcagtggcgctgtgc

SEQ ID NO: 162910 - DNA, 20 bp, Homo sapiens
  source 1..20: mol_type = genomic DNA
gagtgcagtggcgctgtgcg

SEQ ID NO: 162911 - DNA, 20 bp, Homo sapiens
  source 1..20: mol_type = genomic DNA
agtgcagtggcgctgtgcga

SEQ ID NO: 162912 - DNA, 20 bp, Homo sapiens
  source 1..20: mol_type = genomic DNA
gtgcagtggcgctgtgcgat

SEQ ID NO: 162913 - DNA, 20 bp, Homo sapiens
  source 1..20: mol_type = genomic DNA
tgcagtggcgctgtgcgatc

SEQ ID NO: 162914 - DNA, 20 bp, Homo sapiens
  source 1..20: mol_type = genomic DNA
gcagtggcgctgtgcgatca

SEQ ID NO: 162915 - DNA, 20 bp, Homo sapiens
  source 1..20: mol_type = genomic DNA
cagtggcgctgtgcgatcat

SEQ ID NO: 162916 - DNA, 20 bp, Homo sapiens
  source 1..20: mol_type = genomic DNA
agtggcgctgtgcgatcatg

SEQ ID NO: 162917 - DNA, 20 bp, Homo sapiens
  source 1..20: mol_type = genomic DNA
gtggcgctgtgcgatcatgg

SEQ ID NO: 162918 - DNA, 20 bp, Homo sapiens
  source 1..20: mol_type = genomic DNA
tggcgctgtgcgatcatggc

SEQ ID NO: 162919 - DNA, 20 bp, Homo sapiens
  source 1..20: mol_type = genomic DNA
ggcgctgtgcgatcatggct

SEQ ID NO: 162920 - DNA, 20 bp, Homo sapiens
  source 1..20: mol_type = genomic DNA
gcgctgtgcgatcatggctg

SEQ ID NO: 162921 - DNA, 20 bp, Homo sapiens
  source 1..20: mol_type = genomic DNA
cgctgtgcgatcatggctga

SEQ ID NO: 162922 - DNA, 20 bp, Homo sapiens
  source 1..20: mol_type = genomic DNA
gctgtgcgatcatggctgac

SEQ ID NO: 162923 - DNA, 20 bp, Homo sapiens
  source 1..20: mol_type = genomic DNA
ctgtgcgatcatggctgacc

SEQ ID NO: 162924 - DNA, 20 bp, Homo sapiens
  source 1..20: mol_type = genomic DNA
tgtgcgatcatggctgacct

SEQ ID NO: 162925 - DNA, 20 bp, Homo sapiens
  source 1..20: mol_type = genomic DNA
gtgcgatcatggctgacctt

SEQ ID NO: 162926 - DNA, 20 bp, Homo sapiens
  source 1..20: mol_type = genomic DNA
tgcgatcatggctgacctta

SEQ ID NO: 162927 - DNA, 20 bp, Homo sapiens
  source 1..20: mol_type = genomic DNA
gcgatcatggctgaccttag

SEQ ID NO: 162928 - DNA, 20 bp, Homo sapiens
  source 1..20: mol_type = genomic DNA
cgatcatggctgaccttagc

SEQ ID NO: 162929 - DNA, 20 bp, Homo sapiens
  source 1..20: mol_type = genomic DNA
gatcatggctgaccttagcc

SEQ ID NO: 162930 - DNA, 20 bp, Homo sapiens
  source 1..20: mol_type = genomic DNA
atcatggctgaccttagcct

SEQ ID NO: 162931 - DNA, 20 bp, Homo sapiens
  source 1..20: mol_type = genomic DNA
tcatggctgaccttagcctt

SEQ ID NO: 162932 - DNA, 20 bp, Homo sapiens
  source 1..20: mol_type = genomic DNA
catggctgaccttagccttg

SEQ ID NO: 162933 - DNA, 20 bp, Homo sapiens
  source 1..20: mol_type = genomic DNA
atggctgaccttagccttga

SEQ ID NO: 162934 - DNA, 20 bp, Homo sapiens
  source 1..20: mol_type = genomic DNA
tggctgaccttagccttgac

SEQ ID NO: 162935 - DNA, 20 bp, Homo sapiens
  source 1..20: mol_type = genomic DNA
ggctgaccttagccttgacc

SEQ ID NO: 162936 - DNA, 20 bp, Homo sapiens
  source 1..20: mol_type = genomic DNA
gctgaccttagccttgacct

SEQ ID NO: 162937 - DNA, 20 bp, Homo sapiens
  source 1..20: mol_type = genomic DNA
ctgaccttagccttgacctc

SEQ ID NO: 162938 - DNA, 20 bp, Homo sapiens
  source 1..20: mol_type = genomic DNA
tgaccttagccttgacctcc

SEQ ID NO: 162939 - DNA, 20 bp, Homo sapiens
  source 1..20: mol_type = genomic DNA
gaccttagccttgacctccc

SEQ ID NO: 162940 - DNA, 20 bp, Homo sapiens
  source 1..20: mol_type = genomic DNA
accttagccttgacctccca

SEQ ID NO: 162941 - DNA, 20 bp, Homo sapiens
  source 1..20: mol_type = genomic DNA
ccttagccttgacctcccag

SEQ ID NO: 162942 - DNA, 20 bp, Homo sapiens
  source 1..20: mol_type = genomic DNA
cttagccttgacctcccagg

SEQ ID NO: 162943 - DNA, 20 bp, Homo sapiens
  source 1..20: mol_type = genomic DNA
ttagccttgacctcccaggc

SEQ ID NO: 162944 - DNA, 20 bp, Homo sapiens
  source 1..20: mol_type = genomic DNA
tagccttgacctcccaggct

SEQ ID NO: 162945 - DNA, 20 bp, Homo sapiens
  source 1..20: mol_type = genomic DNA
agccttgacctcccaggctc

SEQ ID NO: 162946 - DNA, 20 bp, Homo sapiens
  source 1..20: mol_type = genomic DNA
gccttgacctcccaggctcc

SEQ ID NO: 162947 - DNA, 20 bp, Homo sapiens
  source 1..20: mol_type = genomic DNA
ccttgacctcccaggctcca

SEQ ID NO: 162948 - DNA, 20 bp, Homo sapiens
  source 1..20: mol_type = genomic DNA
cttgacctcccaggctccat

SEQ ID NO: 162949 - DNA, 20 bp, Homo sapiens
  source 1..20: mol_type = genomic DNA
ttgacctcccaggctccatt

SEQ ID NO: 162950 - DNA, 20 bp, Homo sapiens
  source 1..20: mol_type = genomic DNA
tgacctcccaggctccattg

SEQ ID NO: 162951 - DNA, 20 bp, Homo sapiens
  source 1..20: mol_type = genomic DNA
gacctcccaggctccattga

SEQ ID NO: 162952 - DNA, 20 bp, Homo sapiens
  source 1..20: mol_type = genomic DNA
acctcccaggctccattgat

SEQ ID NO: 162953 - DNA, 20 bp, Homo sapiens
  source 1..20: mol_type = genomic DNA
cctcccaggctccattgatc

SEQ ID NO: 162954 - DNA, 20 bp, Homo sapiens
  source 1..20: mol_type = genomic DNA
ctcccaggctccattgatcc

SEQ ID NO: 162955 - DNA, 20 bp, Homo sapiens
  source 1..20: mol_type = genomic DNA
tcccaggctccattgatcct

SEQ ID NO: 162956 - DNA, 20 bp, Homo sapiens
  source 1..20: mol_type = genomic DNA
cccaggctccattgatcctc

SEQ ID NO: 162957 - DNA, 20 bp, Homo sapiens
  source 1..20: mol_type = genomic DNA
ccaggctccattgatcctca

SEQ ID NO: 162958 - DNA, 20 bp, Homo sapiens
  source 1..20: mol_type = genomic DNA
caggctccattgatcctcat

SEQ ID NO: 162959 - DNA, 20 bp, Homo sapiens
  source 1..20: mol_type = genomic DNA
aggctccattgatcctcatg

SEQ ID NO: 162960 - DNA, 20 bp, Homo sapiens
  source 1..20: mol_type = genomic DNA
ggctccattgatcctcatgc

SEQ ID NO: 162961 - DNA, 20 bp, Homo sapiens
  source 1..20: mol_type = genomic DNA
gctccattgatcctcatgcc

SEQ ID NO: 162962 - DNA, 20 bp, Homo sapiens
  source 1..20: mol_type = genomic DNA
ctccattgatcctcatgcct

SEQ ID NO: 162963 - DNA, 20 bp, Homo sapiens
  source 1..20: mol_type = genomic DNA
tccattgatcctcatgcctt

SEQ ID NO: 162964 - DNA, 20 bp, Homo sapiens
  source 1..20: mol_type = genomic DNA
ccattgatcctcatgccttg

SEQ ID NO: 162965 - DNA, 20 bp, Homo sapiens
  source 1..20: mol_type = genomic DNA
cattgatcctcatgccttgg

SEQ ID NO: 162966 - DNA, 20 bp, Homo sapiens
  source 1..20: mol_type = genomic DNA
attgatcctcatgccttggc

SEQ ID NO: 162967 - DNA, 20 bp, Homo sapiens
  source 1..20: mol_type = genomic DNA
ttgatcctcatgccttggcc

SEQ ID NO: 162968 - DNA, 20 bp, Homo sapiens
  source 1..20: mol_type = genomic DNA
tgatcctcatgccttggccc

SEQ ID NO: 162969 - DNA, 20 bp, Homo sapiens
  source 1..20: mol_type = genomic DNA
gatcctcatgccttggcccg

SEQ ID NO: 162970 - DNA, 20 bp, Homo sapiens
  source 1..20: mol_type = genomic DNA
atcctcatgccttggcccgt

SEQ ID NO: 162971 - DNA, 20 bp, Homo sapiens
  source 1..20: mol_type = genomic DNA
tcctcatgccttggcccgta

SEQ ID NO: 162972 - DNA, 20 bp, Homo sapiens
  source 1..20: mol_type = genomic DNA
cctcatgccttggcccgtag

SEQ ID NO: 162973 - DNA, 20 bp, Homo sapiens
  source 1..20: mol_type = genomic DNA
ctcatgccttggcccgtagc

SEQ ID NO: 162974 - DNA, 20 bp, Homo sapiens
  source 1..20: mol_type = genomic DNA
tcatgccttggcccgtagct

SEQ ID NO: 162975 - DNA, 20 bp, Homo sapiens
  source 1..20: mol_type = genomic DNA
catgccttggcccgtagctg

SEQ ID NO: 162976 - DNA, 20 bp, Homo sapiens
  source 1..20: mol_type = genomic DNA
atgccttggcccgtagctgg

SEQ ID NO: 162977 - DNA, 20 bp, Homo sapiens
  source 1..20: mol_type = genomic DNA
tgccttggcccgtagctggg

SEQ ID NO: 162978 - DNA, 20 bp, Homo sapiens
  source 1..20: mol_type = genomic DNA
gccttggcccgtagctggga

SEQ ID NO: 162979 - DNA, 20 bp, Homo sapiens
  source 1..20: mol_type = genomic DNA
ccttggcccgtagctgggac

SEQ ID NO: 162980 - DNA, 20 bp, Homo sapiens
  source 1..20: mol_type = genomic DNA
cttggcccgtagctgggact

SEQ ID NO: 162981 - DNA, 20 bp, Homo sapiens
  source 1..20: mol_type = genomic DNA
ttggcccgtagctgggacta

SEQ ID NO: 162982 - DNA, 20 bp, Homo sapiens
  source 1..20: mol_type = genomic DNA
tggcccgtagctgggactac

SEQ ID NO: 162983 - DNA, 20 bp, Homo sapiens
  source 1..20: mol_type = genomic DNA
ggcccgtagctgggactaca

SEQ ID NO: 162984 - DNA, 20 bp, Homo sapiens
  source 1..20: mol_type = genomic DNA
gcccgtagctgggactacag

SEQ ID NO: 162985 - DNA, 20 bp, Homo sapiens
  source 1..20: mol_type = genomic DNA
cccgtagctgggactacagg

SEQ ID NO: 162986 - DNA, 20 bp, Homo sapiens
  source 1..20: mol_type = genomic DNA
ccgtagctgggactacaggt

SEQ ID NO: 162987 - DNA, 20 bp, Homo sapiens
  source 1..20: mol_type = genomic DNA
cgtagctgggactacaggta

SEQ ID NO: 162988 - DNA, 20 bp, Homo sapiens
  source 1..20: mol_type = genomic DNA
gtagctgggactacaggtac

SEQ ID NO: 162989 - DNA, 20 bp, Homo sapiens
  source 1..20: mol_type = genomic DNA
tagctgggactacaggtaca

SEQ ID NO: 162990 - DNA, 20 bp, Homo sapiens
  source 1..20: mol_type = genomic DNA
agctgggactacaggtacac

SEQ ID NO: 162991 - DNA, 20 bp, Homo sapiens
  source 1..20: mol_type = genomic DNA
gctgggactacaggtacaca

SEQ ID NO: 162992 - DNA, 20 bp, Homo sapiens
  source 1..20: mol_type = genomic DNA
ctgggactacaggtacacac

SEQ ID NO: 162993 - DNA, 20 bp, Homo sapiens
  source 1..20: mol_type = genomic DNA
tgggactacaggtacacacc

SEQ ID NO: 162994 - DNA, 20 bp, Homo sapiens
  source 1..20: mol_type = genomic DNA
gggactacaggtacacacca

SEQ ID NO: 162995 - DNA, 20 bp, Homo sapiens
  source 1..20: mol_type = genomic DNA
ggactacaggtacacaccac

SEQ ID NO: 162996 - DNA, 20 bp, Homo sapiens
  source 1..20: mol_type = genomic DNA
gactacaggtacacaccacc

SEQ ID NO: 162997 - DNA, 20 bp, Homo sapiens
  source 1..20: mol_type = genomic DNA
actacaggtacacaccacca

SEQ ID NO: 162998 - DNA, 20 bp, Homo sapiens
  source 1..20: mol_type = genomic DNA
ctacaggtacacaccaccac

SEQ ID NO: 162999 - DNA, 20 bp, Homo sapiens
  source 1..20: mol_type = genomic DNA
tacaggtacacaccaccacg

SEQ ID NO: 163000 - DNA, 20 bp, Homo sapiens
  source 1..20: mol_type = genomic DNA
acaggtacacaccaccacgc

SEQ ID NO: 163001 - DNA, 20 bp, Homo sapiens
  source 1..20: mol_type = genomic DNA
caggtacacaccaccacgcc

SEQ ID NO: 163002 - DNA, 20 bp, Homo sapiens
  source 1..20: mol_type = genomic DNA
aggtacacaccaccacgcct

SEQ ID NO: 163003 - DNA, 20 bp, Homo sapiens
  source 1..20: mol_type = genomic DNA
ggtacacaccaccacgcctg

SEQ ID NO: 163004 - DNA, 20 bp, Homo sapiens
  source 1..20: mol_type = genomic DNA
gtacacaccaccacgcctgg

SEQ ID NO: 163005 - DNA, 20 bp, Homo sapiens
  source 1..20: mol_type = genomic DNA
tacacaccaccacgcctggc

SEQ ID NO: 163006 - DNA, 20 bp, Homo sapiens
  source 1..20: mol_type = genomic DNA
acacaccaccacgcctggct

SEQ ID NO: 163007 - DNA, 20 bp, Homo sapiens
  source 1..20: mol_type = genomic DNA
cacaccaccacgcctggcta

SEQ ID NO: 163008 - DNA, 20 bp, Homo sapiens
  source 1..20: mol_type = genomic DNA
acaccaccacgcctggctaa

SEQ ID NO: 163009 - DNA, 20 bp, Homo sapiens
  source 1..20: mol_type = genomic DNA
caccaccacgcctggctaat

SEQ ID NO: 163010 - DNA, 20 bp, Homo sapiens
  source 1..20: mol_type = genomic DNA
accaccacgcctggctaatt

SEQ ID NO: 163011 - DNA, 20 bp, Homo sapiens
  source 1..20: mol_type = genomic DNA
ccaccacgcctggctaattt

SEQ ID NO: 163012 - DNA, 20 bp, Homo sapiens
  source 1..20: mol_type = genomic DNA
caccacgcctggctaatttt

SEQ ID NO: 163013 - DNA, 20 bp, Homo sapiens
  source 1..20: mol_type = genomic DNA
accacgcctggctaattttt

SEQ ID NO: 163014 - DNA, 20 bp, Homo sapiens
  source 1..20: mol_type = genomic DNA
ccacgcctggctaatttttg

SEQ ID NO: 163015 - DNA, 20 bp, Homo sapiens
  source 1..20: mol_type = genomic DNA
cacgcctggctaatttttgt

SEQ ID NO: 163016 - DNA, 20 bp, Homo sapiens
  source 1..20: mol_type = genomic DNA
acgcctggctaatttttgta

SEQ ID NO: 163017 - DNA, 20 bp, Homo sapiens
  source 1..20: mol_type = genomic DNA
cgcctggctaatttttgtat

SEQ ID NO: 163018 - DNA, 20 bp, Homo sapiens
  source 1..20: mol_type = genomic DNA
gcctggctaatttttgtatt

SEQ ID NO: 163019 - DNA, 20 bp, Homo sapiens
  source 1..20: mol_type = genomic DNA
cctggctaatttttgtattt

SEQ ID NO: 163020 - DNA, 20 bp, Homo sapiens
  source 1..20: mol_type = genomic DNA
ctggctaatttttgtatttt

SEQ ID NO: 163021 - DNA, 20 bp, Homo sapiens
  source 1..20: mol_type = genomic DNA
tggctaatttttgtattttt

SEQ ID NO: 163022 - DNA, 20 bp, Homo sapiens
  source 1..20: mol_type = genomic DNA
ggctaatttttgtatttttt

SEQ ID NO: 163023 - DNA, 20 bp, Homo sapiens
  source 1..20: mol_type = genomic DNA
gctaatttttgtattttttt

SEQ ID NO: 163024 - DNA, 20 bp, Homo sapiens
  source 1..20: mol_type = genomic DNA
ctaatttttgtatttttttc

SEQ ID NO: 163025 - DNA, 20 bp, Homo sapiens
  source 1..20: mol_type = genomic DNA
taatttttgtatttttttct

SEQ ID NO: 163026 - DNA, 20 bp, Homo sapiens
  source 1..20: mol_type = genomic DNA
aatttttgtatttttttcta

SEQ ID NO: 163027 - DNA, 20 bp, Homo sapiens
  source 1..20: mol_type = genomic DNA
atttttgtatttttttctag

SEQ ID NO: 163028 - DNA, 20 bp, Homo sapiens
  source 1..20: mol_type = genomic DNA
tttttgtatttttttctaga

SEQ ID NO: 163029 - DNA, 20 bp, Homo sapiens
  source 1..20: mol_type = genomic DNA
ttttgtatttttttctagag

SEQ ID NO: 163030 - DNA, 20 bp, Homo sapiens
  source 1..20: mol_type = genomic DNA
tttgtatttttttctagagg

SEQ ID NO: 163031 - DNA, 20 bp, Homo sapiens
  source 1..20: mol_type = genomic DNA
ttgtatttttttctagaggt

SEQ ID NO: 163032 - DNA, 20 bp, Homo sapiens
  source 1..20: mol_type = genomic DNA
tgtatttttttctagaggtg

SEQ ID NO: 163033 - DNA, 20 bp, Homo sapiens
  source 1..20: mol_type = genomic DNA
gtatttttttctagaggtgg

SEQ ID NO: 163034 - DNA, 20 bp, Homo sapiens
  source 1..20: mol_type = genomic DNA
tatttttttctagaggtggg

SEQ ID NO: 163035 - DNA, 20 bp, Homo sapiens
  source 1..20: mol_type = genomic DNA
atttttttctagaggtgggg

SEQ ID NO: 163036 - DNA, 20 bp, Homo sapiens
  source 1..20: mol_type = genomic DNA
tttttttctagaggtggggt

SEQ ID NO: 163037 - DNA, 20 bp, Homo sapiens
  source 1..20: mol_type = genomic DNA
ttttttctagaggtggggtt

SEQ ID NO: 163038 - DNA, 20 bp, Homo sapiens
  source 1..20: mol_type = genomic DNA
tttttctagaggtggggttt

SEQ ID NO: 163039 - DNA, 20 bp, Homo sapiens
  source 1..20: mol_type = genomic DNA
ttttctagaggtggggtttc

SEQ ID NO: 163040 - DNA, 20 bp, Homo sapiens
  source 1..20: mol_type = genomic DNA
tttctagaggtggggtttca

SEQ ID NO: 163041 - DNA, 20 bp, Homo sapiens
  source 1..20: mol_type = genomic DNA
ttctagaggtggggtttcat

SEQ ID NO: 163042 - DNA, 20 bp, Homo sapiens
  source 1..20: mol_type = genomic DNA
tctagaggtggggtttcatc

SEQ ID NO: 163043 - DNA, 20 bp, Homo sapiens
  source 1..20: mol_type = genomic DNA
ctagaggtggggtttcatca

SEQ ID NO: 163044 - DNA, 20 bp, Homo sapiens
  source 1..20: mol_type = genomic DNA
tagaggtggggtttcatcat

SEQ ID NO: 163045 - DNA, 20 bp, Homo sapiens
  source 1..20: mol_type = genomic DNA
agaggtggggtttcatcatg

SEQ ID NO: 163046 - DNA, 20 bp, Homo sapiens
  source 1..20: mol_type = genomic DNA
gaggtggggtttcatcatgt

SEQ ID NO: 163047 - DNA, 20 bp, Homo sapiens
  source 1..20: mol_type = genomic DNA
aggtggggtttcatcatgtt

SEQ ID NO: 163048 - DNA, 20 bp, Homo sapiens
  source 1..20: mol_type = genomic DNA
ggtggggtttcatcatgttg

SEQ ID NO: 163049 - DNA, 20 bp, Homo sapiens
  source 1..20: mol_type = genomic DNA
gtggggtttcatcatgttgc

SEQ ID NO: 163050 - DNA, 20 bp, Homo sapiens
  source 1..20: mol_type = genomic DNA
tggggtttcatcatgttgcc

SEQ ID NO: 163051 - DNA, 20 bp, Homo sapiens
  source 1..20: mol_type = genomic DNA
ggggtttcatcatgttgccc

SEQ ID NO: 163052 - DNA, 20 bp, Homo sapiens
  source 1..20: mol_type = genomic DNA
gggtttcatcatgttgccca

SEQ ID NO: 163053 - DNA, 20 bp, Homo sapiens
  source 1..20: mol_type = genomic DNA
ggtttcatcatgttgcccag

SEQ ID NO: 163054 - DNA, 20 bp, Homo sapiens
  source 1..20: mol_type = genomic DNA
gtttcatcatgttgcccagg

SEQ ID NO: 163055 - DNA, 20 bp, Homo sapiens
  source 1..20: mol_type = genomic DNA
tttcatcatgttgcccaggc

SEQ ID NO: 163056 - DNA, 20 bp, Homo sapiens
  source 1..20: mol_type = genomic DNA
ttcatcatgttgcccaggct

SEQ ID NO: 163057 - DNA, 20 bp, Homo sapiens
  source 1..20: mol_type = genomic DNA
tcatcatgttgcccaggctg

SEQ ID NO: 163058 - DNA, 20 bp, Homo sapiens
  source 1..20: mol_type = genomic DNA
catcatgttgcccaggctgg

SEQ ID NO: 163059 - DNA, 20 bp, Homo sapiens
  source 1..20: mol_type = genomic DNA
atcatgttgcccaggctggt

SEQ ID NO: 163060 - DNA, 20 bp, Homo sapiens
  source 1..20: mol_type = genomic DNA
tcatgttgcccaggctggtc

SEQ ID NO: 163061 - DNA, 20 bp, Homo sapiens
  source 1..20: mol_type = genomic DNA
catgttgcccaggctggtct

SEQ ID NO: 163062 - DNA, 20 bp, Homo sapiens
  source 1..20: mol_type = genomic DNA
atgttgcccaggctggtctt

SEQ ID NO: 163063 - DNA, 20 bp, Homo sapiens
  source 1..20: mol_type = genomic DNA
tgttgcccaggctggtcttg

SEQ ID NO: 163064 - DNA, 20 bp, Homo sapiens
  source 1..20: mol_type = genomic DNA
gttgcccaggctggtcttga

SEQ ID NO: 163065 - DNA, 20 bp, Homo sapiens
  source 1..20: mol_type = genomic DNA
ttgcccaggctggtcttgaa

SEQ ID NO: 163066 - DNA, 20 bp, Homo sapiens
  source 1..20: mol_type = genomic DNA
tgcccaggctggtcttgaac

SEQ ID NO: 163067 - DNA, 20 bp, Homo sapiens
  source 1..20: mol_type = genomic DNA
gcccaggctggtcttgaact

SEQ ID NO: 163068 - DNA, 20 bp, Homo sapiens
  source 1..20: mol_type = genomic DNA
cccaggctggtcttgaactg

SEQ ID NO: 163069 - DNA, 20 bp, Homo sapiens
  source 1..20: mol_type = genomic DNA
ccaggctggtcttgaactgc

SEQ ID NO: 163070 - DNA, 20 bp, Homo sapiens
  source 1..20: mol_type = genomic DNA
caggctggtcttgaactgct

SEQ ID NO: 163071 - DNA, 20 bp, Homo sapiens
  source 1..20: mol_type = genomic DNA
aggctggtcttgaactgctg

SEQ ID NO: 163072 - DNA, 20 bp, Homo sapiens
  source 1..20: mol_type = genomic DNA
ggctggtcttgaactgctgg

SEQ ID NO: 163073 - DNA, 20 bp, Homo sapiens
  source 1..20: mol_type = genomic DNA
gctggtcttgaactgctggg

SEQ ID NO: 163074 - DNA, 20 bp, Homo sapiens
  source 1..20: mol_type = genomic DNA
ctggtcttgaactgctgggc

SEQ ID NO: 163075 - DNA, 20 bp, Homo sapiens
  source 1..20: mol_type = genomic DNA
tggtcttgaactgctgggct

SEQ ID NO: 163076 - DNA, 20 bp, Homo sapiens
  source 1..20: mol_type = genomic DNA
ggtcttgaactgctgggctc

SEQ ID NO: 163077 - DNA, 20 bp, Homo sapiens
  source 1..20: mol_type = genomic DNA
gtcttgaactgctgggctca

SEQ ID NO: 163078 - DNA, 20 bp, Homo sapiens
  source 1..20: mol_type = genomic DNA
tcttgaactgctgggctcaa

SEQ ID NO: 163079 - DNA, 20 bp, Homo sapiens
  source 1..20: mol_type = genomic DNA
cttgaactgctgggctcaag

SEQ ID NO: 163080 - DNA, 20 bp, Homo sapiens
  source 1..20: mol_type = genomic DNA
ttgaactgctgggctcaagt

SEQ ID NO: 163081 - DNA, 20 bp, Homo sapiens
  source 1..20: mol_type = genomic DNA
tgaactgctgggctcaagtg

SEQ ID NO: 163082 - DNA, 20 bp, Homo sapiens
  source 1..20: mol_type = genomic DNA
gaactgctgggctcaagtgg

SEQ ID NO: 163083 - DNA, 20 bp, Homo sapiens
  source 1..20: mol_type = genomic DNA
aactgctgggctcaagtggt

SEQ ID NO: 163084 - DNA, 20 bp, Homo sapiens
  source 1..20: mol_type = genomic DNA
actgctgggctcaagtggtc

SEQ ID NO: 163085 - DNA, 20 bp, Homo sapiens
  source 1..20: mol_type = genomic DNA
ctgctgggctcaagtggtct

SEQ ID NO: 163086 - DNA, 20 bp, Homo sapiens
  source 1..20: mol_type = genomic DNA
tgctgggctcaagtggtcta

SEQ ID NO: 163087 - DNA, 20 bp, Homo sapiens
  source 1..20: mol_type = genomic DNA
gctgggctcaagtggtctat

SEQ ID NO: 163088 - DNA, 20 bp, Homo sapiens
  source 1..20: mol_type = genomic DNA
ctgggctcaagtggtctatc

SEQ ID NO: 163089 - DNA, 20 bp, Homo sapiens
  source 1..20: mol_type = genomic DNA
tgggctcaagtggtctatcc

SEQ ID NO: 163090 - DNA, 20 bp, Homo sapiens
  source 1..20: mol_type = genomic DNA
gggctcaagtggtctatcct

SEQ ID NO: 163091 - DNA, 20 bp, Homo sapiens
  source 1..20: mol_type = genomic DNA
ggctcaagtggtctatcctc

SEQ ID NO: 163092 - DNA, 20 bp, Homo sapiens
  source 1..20: mol_type = genomic DNA
gctcaagtggtctatcctcc

SEQ ID NO: 163093 - DNA, 20 bp, Homo sapiens
  source 1..20: mol_type = genomic DNA
ctcaagtggtctatcctcct

SEQ ID NO: 163094 - DNA, 20 bp, Homo sapiens
  source 1..20: mol_type = genomic DNA
tcaagtggtctatcctcctc

SEQ ID NO: 163095 - DNA, 20 bp, Homo sapiens
  source 1..20: mol_type = genomic DNA
caagtggtctatcctcctcg

SEQ ID NO: 163096 - DNA, 20 bp, Homo sapiens
  source 1..20: mol_type = genomic DNA
aagtggtctatcctcctcga

SEQ ID NO: 163097 - DNA, 20 bp, Homo sapiens
  source 1..20: mol_type = genomic DNA
agtggtctatcctcctcgac

SEQ ID NO: 163098 - DNA, 20 bp, Homo sapiens
  source 1..20: mol_type = genomic DNA
gtggtctatcctcctcgacc

SEQ ID NO: 163099 - DNA, 20 bp, Homo sapiens
  source 1..20: mol_type = genomic DNA
tggtctatcctcctcgacct

SEQ ID NO: 163100 - DNA, 20 bp, Homo sapiens
  source 1..20: mol_type = genomic DNA
ggtctatcctcctcgacctc

SEQ ID NO: 163101 - DNA, 20 bp, Homo sapiens
  source 1..20: mol_type = genomic DNA
gtctatcctcctcgacctcc

SEQ ID NO: 163102 - DNA, 20 bp, Homo sapiens
  source 1..20: mol_type = genomic DNA
tctatcctcctcgacctccc

SEQ ID NO: 163103 - DNA, 20 bp, Homo sapiens
  source 1..20: mol_type = genomic DNA
ctatcctcctcgacctccca

SEQ ID NO: 163104 - DNA, 20 bp, Homo sapiens
  source 1..20: mol_type = genomic DNA
tatcctcctcgacctcccaa

SEQ ID NO: 163105 - DNA, 20 bp, Homo sapiens
  source 1..20: mol_type = genomic DNA
atcctcctcgacctcccaaa

SEQ ID NO: 163106 - DNA, 20 bp, Homo sapiens
  source 1..20: mol_type = genomic DNA
tcctcctcgacctcccaaag

SEQ ID NO: 163107 - DNA, 20 bp, Homo sapiens
  source 1..20: mol_type = genomic DNA
cctcctcgacctcccaaagt

SEQ ID NO: 163108 - DNA, 20 bp, Homo sapiens
  source 1..20: mol_type = genomic DNA
ctcctcgacctcccaaagtg

SEQ ID NO: 163109 - DNA, 20 bp, Homo sapiens
  source 1..20: mol_type = genomic DNA
tcctcgacctcccaaagtgc

SEQ ID NO: 163110 - DNA, 20 bp, Homo sapiens
  source 1..20: mol_type = genomic DNA
cctcgacctcccaaagtgct

SEQ ID NO: 163111 - DNA, 20 bp, Homo sapiens
  source 1..20: mol_type = genomic DNA
ctcgacctcccaaagtgctg

SEQ ID NO: 163112 - DNA, 20 bp, Homo sapiens
  source 1..20: mol_type = genomic DNA
tcgacctcccaaagtgctgg

SEQ ID NO: 163113 - DNA, 20 bp, Homo sapiens
  source 1..20: mol_type = genomic DNA
cgacctcccaaagtgctggg

SEQ ID NO: 163114 - DNA, 20 bp, Homo sapiens
  source 1..20: mol_type = genomic DNA
gacctcccaaagtgctggga

SEQ ID NO: 163115 - DNA, 20 bp, Homo sapiens
  source 1..20: mol_type = genomic DNA
acctcccaaagtgctgggat

SEQ ID NO: 163116 - DNA, 20 bp, Homo sapiens
  source 1..20: mol_type = genomic DNA
cctcccaaagtgctgggatt

SEQ ID NO: 163117 - DNA, 20 bp, Homo sapiens
  source 1..20: mol_type = genomic DNA
ctcccaaagtgctgggatta

SEQ ID NO: 163118 - DNA, 20 bp, Homo sapiens
  source 1..20: mol_type = genomic DNA
tcccaaagtgctgggattac

SEQ ID NO: 163119 - DNA, 20 bp, Homo sapiens
  source 1..20: mol_type = genomic DNA
cccaaagtgctgggattaca

SEQ ID NO: 163120 - DNA, 20 bp, Homo sapiens
  source 1..20: mol_type = genomic DNA
ccaaagtgctgggattacat

SEQ ID NO: 163121 - DNA, 20 bp, Homo sapiens
  source 1..20: mol_type = genomic DNA
caaagtgctgggattacatg

SEQ ID NO: 163122 - DNA, 20 bp, Homo sapiens
  source 1..20: mol_type = genomic DNA
aaagtgctgggattacatgt

SEQ ID NO: 163123 - DNA, 20 bp, Homo sapiens
  source 1..20: mol_type = genomic DNA
aagtgctgggattacatgtg

SEQ ID NO: 163124 - DNA, 20 bp, Homo sapiens
  source 1..20: mol_type = genomic DNA
agtgctgggattacatgtgt

SEQ ID NO: 163125 - DNA, 20 bp, Homo sapiens
  source 1..20: mol_type = genomic DNA
gtgctgggattacatgtgtg

SEQ ID NO: 163126 - DNA, 20 bp, Homo sapiens
  source 1..20: mol_type = genomic DNA
tgctgggattacatgtgtga

SEQ ID NO: 163127 - DNA, 20 bp, Homo sapiens
  source 1..20: mol_type = genomic DNA
gctgggattacatgtgtgag

SEQ ID NO: 163128 - DNA, 20 bp, Homo sapiens
  source 1..20: mol_type = genomic DNA
ctgggattacatgtgtgagc

SEQ ID NO: 163129 - DNA, 20 bp, Homo sapiens
  source 1..20: mol_type = genomic DNA
tgggattacatgtgtgagcc

SEQ ID NO: 163130 - DNA, 20 bp, Homo sapiens
  source 1..20: mol_type = genomic DNA
gggattacatgtgtgagcca

SEQ ID NO: 163131 - DNA, 20 bp, Homo sapiens
  source 1..20: mol_type = genomic DNA
ggattacatgtgtgagccac

SEQ ID NO: 163132 - DNA, 20 bp, Homo sapiens
  source 1..20: mol_type = genomic DNA
gattacatgtgtgagccact

SEQ ID NO: 163133 - DNA, 20 bp, Homo sapiens
  source 1..20: mol_type = genomic DNA
attacatgtgtgagccactg

SEQ ID NO: 163134 - DNA, 20 bp, Homo sapiens
  source 1..20: mol_type = genomic DNA
ttacatgtgtgagccactgt

SEQ ID NO: 163135 - DNA, 20 bp, Homo sapiens
  source 1..20: mol_type = genomic DNA
tacatgtgtgagccactgtg

SEQ ID NO: 163136 - DNA, 20 bp, Homo sapiens
  source 1..20: mol_type = genomic DNA
acatgtgtgagccactgtgc

SEQ ID NO: 163137 - DNA, 20 bp, Homo sapiens
  source 1..20: mol_type = genomic DNA
catgtgtgagccactgtgcc

SEQ ID NO: 163138 - DNA, 20 bp, Homo sapiens
  source 1..20: mol_type = genomic DNA
atgtgtgagccactgtgcct

SEQ ID NO: 163139 - DNA, 20 bp, Homo sapiens
  source 1..20: mol_type = genomic DNA
tgtgtgagccactgtgcctg

SEQ ID NO: 163140 - DNA, 20 bp, Homo sapiens
  source 1..20: mol_type = genomic DNA
gtgtgagccactgtgcctgg

SEQ ID NO: 163141 - DNA, 20 bp, Homo sapiens
  source 1..20: mol_type = genomic DNA
tgtgagccactgtgcctggg

SEQ ID NO: 163142 - DNA, 20 bp, Homo sapiens
  source 1..20: mol_type = genomic DNA
gtgagccactgtgcctggga

SEQ ID NO: 163143 - DNA, 20 bp, Homo sapiens
  source 1..20: mol_type = genomic DNA
tgagccactgtgcctgggaa

SEQ ID NO: 163144 - DNA, 20 bp, Homo sapiens
  source 1..20: mol_type = genomic DNA
gagccactgtgcctgggaaa

SEQ ID NO: 163145 - DNA, 20 bp, Homo sapiens
  source 1..20: mol_type = genomic DNA
agccactgtgcctgggaaaa

SEQ ID NO: 163146 - DNA, 20 bp, Homo sapiens
  source 1..20: mol_type = genomic DNA
gccactgtgcctgggaaaac

SEQ ID NO: 163147 - DNA, 20 bp, Homo sapiens
  source 1..20: mol_type = genomic DNA
ccactgtgcctgggaaaacc

SEQ ID NO: 163148 - DNA, 20 bp, Homo sapiens
  source 1..20: mol_type = genomic DNA
cactgtgcctgggaaaaccc

SEQ ID NO: 163149 - DNA, 20 bp, Homo sapiens
  source 1..20: mol_type = genomic DNA
actgtgcctgggaaaaccct

SEQ ID NO: 163150 - DNA, 20 bp, Homo sapiens
  source 1..20: mol_type = genomic DNA
ctgtgcctgggaaaaccctc

SEQ ID NO: 163151 - DNA, 20 bp, Homo sapiens
  source 1..20: mol_type = genomic DNA
tgtgcctgggaaaaccctca

SEQ ID NO: 163152 - DNA, 20 bp, Homo sapiens
  source 1..20: mol_type = genomic DNA
gtgcctgggaaaaccctcaa

SEQ ID NO: 163153 - DNA, 20 bp, Homo sapiens
  source 1..20: mol_type = genomic DNA
tgcctgggaaaaccctcaac

SEQ ID NO: 163154 - DNA, 20 bp, Homo sapiens
  source 1..20: mol_type = genomic DNA
gcctgggaaaaccctcaact

SEQ ID NO: 163155 - DNA, 20 bp, Homo sapiens
  source 1..20: mol_type = genomic DNA
cctgggaaaaccctcaactt

SEQ ID NO: 163156 - DNA, 20 bp, Homo sapiens
  source 1..20: mol_type = genomic DNA
ctgggaaaaccctcaacttt

SEQ ID NO: 163157 - DNA, 20 bp, Homo sapiens
  source 1..20: mol_type = genomic DNA
tgggaaaaccctcaactttt

SEQ ID NO: 163158 - DNA, 20 bp, Homo sapiens
  source 1..20: mol_type = genomic DNA
gggaaaaccctcaacttttc

SEQ ID NO: 163159 - DNA, 20 bp, Homo sapiens
  source 1..20: mol_type = genomic DNA
ggaaaaccctcaacttttct

SEQ ID NO: 163160 - DNA, 20 bp, Homo sapiens
  source 1..20: mol_type = genomic DNA
gaaaaccctcaacttttctt

SEQ ID NO: 163161 - DNA, 20 bp, Homo sapiens
  source 1..20: mol_type = genomic DNA
aaaaccctcaacttttcttt

SEQ ID NO: 163162 - DNA, 20 bp, Homo sapiens
  source 1..20: mol_type = genomic DNA
aaaccctcaacttttctttt

SEQ ID NO: 163163 - DNA, 20 bp, Homo sapiens
  source 1..20: mol_type = genomic DNA
aaccctcaacttttctttta

SEQ ID NO: 163164 - DNA, 20 bp, Homo sapiens
  source 1..20: mol_type = genomic DNA
accctcaacttttcttttaa

SEQ ID NO: 163165 - DNA, 20 bp, Homo sapiens
  source 1..20: mol_type = genomic DNA
ccctcaacttttcttttaaa

SEQ ID NO: 163166 - DNA, 20 bp, Homo sapiens
  source 1..20: mol_type = genomic DNA
cctcaacttttcttttaaaa

SEQ ID NO: 163167 - DNA, 20 bp, Homo sapiens
  source 1..20: mol_type = genomic DNA
ctcaacttttcttttaaaaa

SEQ ID NO: 163168 - DNA, 20 bp, Homo sapiens
  source 1..20: mol_type = genomic DNA
tcaacttttcttttaaaaaa

SEQ ID NO: 163169 - DNA, 20 bp, Homo sapiens
  source 1..20: mol_type = genomic DNA
caacttttcttttaaaaaag

SEQ ID NO: 163170 - DNA, 20 bp, Homo sapiens
  source 1..20: mol_type = genomic DNA
aacttttcttttaaaaaaga

SEQ ID NO: 163171 - DNA, 20 bp, Homo sapiens
  source 1..20: mol_type = genomic DNA
acttttcttttaaaaaagag

SEQ ID NO: 163172 - DNA, 20 bp, Homo sapiens
  source 1..20: mol_type = genomic DNA
cttttcttttaaaaaagagg

SEQ ID NO: 163173 - DNA, 20 bp, Homo sapiens
  source 1..20: mol_type = genomic DNA
ttttcttttaaaaaagaggt

SEQ ID NO: 163174 - DNA, 20 bp, Homo sapiens
  source 1..20: mol_type = genomic DNA
tttcttttaaaaaagaggtc

SEQ ID NO: 163175 - DNA, 20 bp, Homo sapiens
  source 1..20: mol_type = genomic DNA
ttcttttaaaaaagaggtca

SEQ ID NO: 163176 - DNA, 20 bp, Homo sapiens
  source 1..20: mol_type = genomic DNA
tcttttaaaaaagaggtcaa

SEQ ID NO: 163177 - DNA, 20 bp, Homo sapiens
  source 1..20: mol_type = genomic DNA
cttttaaaaaagaggtcaac

SEQ ID NO: 163178 - DNA, 20 bp, Homo sapiens
  source 1..20: mol_type = genomic DNA
ttttaaaaaagaggtcaact

SEQ ID NO: 163179 - DNA, 20 bp, Homo sapiens
  source 1..20: mol_type = genomic DNA
tttaaaaaagaggtcaactt

SEQ ID NO: 163180 - DNA, 20 bp, Homo sapiens
  source 1..20: mol_type = genomic DNA
ttaaaaaagaggtcaacttt

SEQ ID NO: 163181 - DNA, 20 bp, Homo sapiens
  source 1..20: mol_type = genomic DNA
taaaaaagaggtcaacttta

SEQ ID NO: 163182 - DNA, 20 bp, Homo sapiens
  source 1..20: mol_type = genomic DNA
aaaaaagaggtcaactttat

SEQ ID NO: 163183 - DNA, 20 bp, Homo sapiens
  source 1..20: mol_type = genomic DNA
aaaaagaggtcaactttatt

SEQ ID NO: 163184 - DNA, 20 bp, Homo sapiens
  source 1..20: mol_type = genomic DNA
aaaagaggtcaactttattg

SEQ ID NO: 163185 - DNA, 20 bp, Homo sapiens
  source 1..20: mol_type = genomic DNA
aaagaggtcaactttattgt

SEQ ID NO: 163186 - DNA, 20 bp, Homo sapiens
  source 1..20: mol_type = genomic DNA
aagaggtcaactttattgta

SEQ ID NO: 163187 - DNA, 20 bp, Homo sapiens
  source 1..20: mol_type = genomic DNA
agaggtcaactttattgtat

SEQ ID NO: 163188 - DNA, 20 bp, Homo sapiens
  source 1..20: mol_type = genomic DNA
gaggtcaactttattgtata

SEQ ID NO: 163189 - DNA, 20 bp, Homo sapiens
  source 1..20: mol_type = genomic DNA
aggtcaactttattgtatat

SEQ ID NO: 163190 - DNA, 20 bp, Homo sapiens
  source 1..20: mol_type = genomic DNA
ggtcaactttattgtatata

SEQ ID NO: 163191 - DNA, 20 bp, Homo sapiens
  source 1..20: mol_type = genomic DNA
gtcaactttattgtatataa

SEQ ID NO: 163192 - DNA, 20 bp, Homo sapiens
  source 1..20: mol_type = genomic DNA
tcaactttattgtatataag

SEQ ID NO: 163193 - DNA, 20 bp, Homo sapiens
  source 1..20: mol_type = genomic DNA
caactttattgtatataagc

SEQ ID NO: 163194 - DNA, 20 bp, Homo sapiens
  source 1..20: mol_type = genomic DNA
aactttattgtatataagca

SEQ ID NO: 163195 - DNA, 20 bp, Homo sapiens
  source 1..20: mol_type = genomic DNA
actttattgtatataagcac

SEQ ID NO: 163196 - DNA, 20 bp, Homo sapiens
  source 1..20: mol_type = genomic DNA
ctttattgtatataagcact

SEQ ID NO: 163197 - DNA, 20 bp, Homo sapiens
  source 1..20: mol_type = genomic DNA
tttattgtatataagcactg

SEQ ID NO: 163198 - DNA, 20 bp, Homo sapiens
  source 1..20: mol_type = genomic DNA
ttattgtatataagcactgt

SEQ ID NO: 163199 - DNA, 20 bp, Homo sapiens
  source 1..20: mol_type = genomic DNA
tattgtatataagcactgtg

SEQ ID NO: 163200 - DNA, 20 bp, Homo sapiens
  source 1..20: mol_type = genomic DNA
attgtatataagcactgtgc

SEQ ID NO: 163201 - DNA, 20 bp, Homo sapiens
  source 1..20: mol_type = genomic DNA
ttgtatataagcactgtgct

SEQ ID NO: 163202 - DNA, 20 bp, Homo sapiens
  source 1..20: mol_type = genomic DNA
tgtatataagcactgtgcta

SEQ ID NO: 163203 - DNA, 20 bp, Homo sapiens
  source 1..20: mol_type = genomic DNA
gtatataagcactgtgctaa

SEQ ID NO: 163204 - DNA, 20 bp, Homo sapiens
  source 1..20: mol_type = genomic DNA
tatataagcactgtgctaaa

SEQ ID NO: 163205 - DNA, 20 bp, Homo sapiens
  source 1..20: mol_type = genomic DNA
atataagcactgtgctaaaa

SEQ ID NO: 163206 - DNA, 20 bp, Homo sapiens
  source 1..20: mol_type = genomic DNA
tataagcactgtgctaaaat

SEQ ID NO: 163207 - DNA, 20 bp, Homo sapiens
  source 1..20: mol_type = genomic DNA
ataagcactgtgctaaaatt

SEQ ID NO: 163208 - DNA, 20 bp, Homo sapiens
  source 1..20: mol_type = genomic DNA
taagcactgtgctaaaattg

SEQ ID NO: 163209 - DNA, 20 bp, Homo sapiens
  source 1..20: mol_type = genomic DNA
aagcactgtgctaaaattgc

SEQ ID NO: 163210 - DNA, 20 bp, Homo sapiens
  source 1..20: mol_type = genomic DNA
agcactgtgctaaaattgca

SEQ ID NO: 163211 - DNA, 20 bp, Homo sapiens
  source 1..20: mol_type = genomic DNA
gcactgtgctaaaattgcag

SEQ ID NO: 163212 - DNA, 20 bp, Homo sapiens
  source 1..20: mol_type = genomic DNA
cactgtgctaaaattgcagg

SEQ ID NO: 163213 - DNA, 20 bp, Homo sapiens
  source 1..20: mol_type = genomic DNA
actgtgctaaaattgcagga

SEQ ID NO: 163214 - DNA, 20 bp, Homo sapiens
  source 1..20: mol_type = genomic DNA
ctgtgctaaaattgcaggaa

SEQ ID NO: 163215 - DNA, 20 bp, Homo sapiens
  source 1..20: mol_type = genomic DNA
tgtgctaaaattgcaggaac

SEQ ID NO: 163216 - DNA, 20 bp, Homo sapiens
  source 1..20: mol_type = genomic DNA
gtgctaaaattgcaggaact

SEQ ID NO: 163217 - DNA, 20 bp, Homo sapiens
  source 1..20: mol_type = genomic DNA
tgctaaaattgcaggaactg

SEQ ID NO: 163218 - DNA, 20 bp, Homo sapiens
  source 1..20: mol_type = genomic DNA
gctaaaattgcaggaactgg

SEQ ID NO: 163219 - DNA, 20 bp, Homo sapiens
  source 1..20: mol_type = genomic DNA
ctaaaattgcaggaactggg

SEQ ID NO: 163220 - DNA, 20 bp, Homo sapiens
  source 1..20: mol_type = genomic DNA
taaaattgcaggaactggga

SEQ ID NO: 163221 - DNA, 20 bp, Homo sapiens
  source 1..20: mol_type = genomic DNA
aaaattgcaggaactgggac

SEQ ID NO: 163222 - DNA, 20 bp, Homo sapiens
  source 1..20: mol_type = genomic DNA
aaattgcaggaactgggacc

SEQ ID NO: 163223 - DNA, 20 bp, Homo sapiens
  source 1..20: mol_type = genomic DNA
aattgcaggaactgggacca

SEQ ID NO: 163224 - DNA, 20 bp, Homo sapiens
  source 1..20: mol_type = genomic DNA
attgcaggaactgggaccat

SEQ ID NO: 163225 - DNA, 20 bp, Homo sapiens
  source 1..20: mol_type = genomic DNA
ttgcaggaactgggaccata

SEQ ID NO: 163226 - DNA, 20 bp, Homo sapiens
  source 1..20: mol_type = genomic DNA
tgcaggaactgggaccatat

SEQ ID NO: 163227 - DNA, 20 bp, Homo sapiens
  source 1..20: mol_type = genomic DNA
gcaggaactgggaccatatc

SEQ ID NO: 163228 - DNA, 20 bp, Homo sapiens
  source 1..20: mol_type = genomic DNA
caggaactgggaccatatcc

SEQ ID NO: 163229 - DNA, 20 bp, Homo sapiens
  source 1..20: mol_type = genomic DNA
aggaactgggaccatatcct

SEQ ID NO: 163230 - DNA, 20 bp, Homo sapiens
  source 1..20: mol_type = genomic DNA
ggaactgggaccatatcctg

SEQ ID NO: 163231 - DNA, 20 bp, Homo sapiens
  source 1..20: mol_type = genomic DNA
gaactgggaccatatcctga

SEQ ID NO: 163232 - DNA, 20 bp, Homo sapiens
  source 1..20: mol_type = genomic DNA
aactgggaccatatcctgat

SEQ ID NO: 163233 - DNA, 20 bp, Homo sapiens
  source 1..20: mol_type = genomic DNA
actgggaccatatcctgatt

SEQ ID NO: 163234 - DNA, 20 bp, Homo sapiens
  source 1..20: mol_type = genomic DNA
ctgggaccatatcctgattt

SEQ ID NO: 163235 - DNA, 20 bp, Homo sapiens
  source 1..20: mol_type = genomic DNA
tgggaccatatcctgatttt

SEQ ID NO: 163236 - DNA, 20 bp, Homo sapiens
  source 1..20: mol_type = genomic DNA
gggaccatatcctgattttt

SEQ ID NO: 163237 - DNA, 20 bp, Homo sapiens
  source 1..20: mol_type = genomic DNA
ggaccatatcctgatttttg

SEQ ID NO: 163238 - DNA, 20 bp, Homo sapiens
  source 1..20: mol_type = genomic DNA
gaccatatcctgatttttgt

SEQ ID NO: 163239 - DNA, 20 bp, Homo sapiens
  source 1..20: mol_type = genomic DNA
accatatcctgatttttgta

SEQ ID NO: 163240 - DNA, 20 bp, Homo sapiens
  source 1..20: mol_type = genomic DNA
ccatatcctgatttttgtaa

SEQ ID NO: 163241 - DNA, 20 bp, Homo sapiens
  source 1..20: mol_type = genomic DNA
catatcctgatttttgtaat

SEQ ID NO: 163242 - DNA, 20 bp, Homo sapiens
  source 1..20: mol_type = genomic DNA
atatcctgatttttgtaata

SEQ ID NO: 163243 - DNA, 20 bp, Homo sapiens
  source 1..20: mol_type = genomic DNA
tatcctgatttttgtaataa

SEQ ID NO: 163244 - DNA, 20 bp, Homo sapiens
  source 1..20: mol_type = genomic DNA
atcctgatttttgtaataat

SEQ ID NO: 163245 - DNA, 20 bp, Homo sapiens
  source 1..20: mol_type = genomic DNA
tcctgatttttgtaataatg

SEQ ID NO: 163246 - DNA, 20 bp, Homo sapiens
  source 1..20: mol_type = genomic DNA
cctgatttttgtaataatgc

SEQ ID NO: 163247 - DNA, 20 bp, Homo sapiens
  source 1..20: mol_type = genomic DNA
ctgatttttgtaataatgcc

SEQ ID NO: 163248 - DNA, 20 bp, Homo sapiens
  source 1..20: mol_type = genomic DNA
tgatttttgtaataatgcca

SEQ ID NO: 163249 - DNA, 20 bp, Homo sapiens
  source 1..20: mol_type = genomic DNA
gatttttgtaataatgccag

SEQ ID NO: 163250 - DNA, 20 bp, Homo sapiens
  source 1..20: mol_type = genomic DNA
atttttgtaataatgccagc

SEQ ID NO: 163251 - DNA, 20 bp, Homo sapiens
  source 1..20: mol_type = genomic DNA
tttttgtaataatgccagca

SEQ ID NO: 163252 - DNA, 20 bp, Homo sapiens
  source 1..20: mol_type = genomic DNA
ttttgtaataatgccagcag

SEQ ID NO: 163253 - DNA, 20 bp, Homo sapiens
  source 1..20: mol_type = genomic DNA
tttgtaataatgccagcaga

SEQ ID NO: 163254 - DNA, 20 bp, Homo sapiens
  source 1..20: mol_type = genomic DNA
ttgtaataatgccagcagag

SEQ ID NO: 163255 - DNA, 20 bp, Homo sapiens
  source 1..20: mol_type = genomic DNA
tgtaataatgccagcagagt

SEQ ID NO: 163256 - DNA, 20 bp, Homo sapiens
  source 1..20: mol_type = genomic DNA
gtaataatgccagcagagta

SEQ ID NO: 163257 - DNA, 20 bp, Homo sapiens
  source 1..20: mol_type = genomic DNA
taataatgccagcagagtac

SEQ ID NO: 163258 - DNA, 20 bp, Homo sapiens
  source 1..20: mol_type = genomic DNA
aataatgccagcagagtaca

SEQ ID NO: 163259 - DNA, 20 bp, Homo sapiens
  source 1..20: mol_type = genomic DNA
ataatgccagcagagtacac

SEQ ID NO: 163260 - DNA, 20 bp, Homo sapiens
  source 1..20: mol_type = genomic DNA
taatgccagcagagtacaca

SEQ ID NO: 163261 - DNA, 20 bp, Homo sapiens
  source 1..20: mol_type = genomic DNA
aatgccagcagagtacacac

SEQ ID NO: 163262 - DNA, 20 bp, Homo sapiens
  source 1..20: mol_type = genomic DNA
atgccagcagagtacacaca

SEQ ID NO: 163263 - DNA, 20 bp, Homo sapiens
  source 1..20: mol_type = genomic DNA
tgccagcagagtacacacaa

SEQ ID NO: 163264 - DNA, 20 bp, Homo sapiens
  source 1..20: mol_type = genomic DNA
gccagcagagtacacacaag

SEQ ID NO: 163265 - DNA, 20 bp, Homo sapiens
  source 1..20: mol_type = genomic DNA
ccagcagagtacacacaaga

SEQ ID NO: 163266 - DNA, 20 bp, Homo sapiens
  source 1..20: mol_type = genomic DNA
cagcagagtacacacaagaa

SEQ ID NO: 163267 - DNA, 20 bp, Homo sapiens
  source 1..20: mol_type = genomic DNA
agcagagtacacacaagaaa

SEQ ID NO: 163268 - DNA, 20 bp, Homo sapiens
  source 1..20: mol_type = genomic DNA
gcagagtacacacaagaaaa

SEQ ID NO: 163269 - DNA, 20 bp, Homo sapiens
  source 1..20: mol_type = genomic DNA
cagagtacacacaagaaaag

SEQ ID NO: 163270 - DNA, 20 bp, Homo sapiens
  source 1..20: mol_type = genomic DNA
agagtacacacaagaaaagt

SEQ ID NO: 163271 - DNA, 20 bp, Homo sapiens
  source 1..20: mol_type = genomic DNA
gagtacacacaagaaaagta

SEQ ID NO: 163272 - DNA, 20 bp, Homo sapiens
  source 1..20: mol_type = genomic DNA
agtacacacaagaaaagtaa

SEQ ID NO: 163273 - DNA, 20 bp, Homo sapiens
  source 1..20: mol_type = genomic DNA
gtacacacaagaaaagtaac

SEQ ID NO: 163274 - DNA, 20 bp, Homo sapiens
  source 1..20: mol_type = genomic DNA
tacacacaagaaaagtaact

SEQ ID NO: 163275 - DNA, 20 bp, Homo sapiens
  source 1..20: mol_type = genomic DNA
acacacaagaaaagtaactg

SEQ ID NO: 163276 - DNA, 20 bp, Homo sapiens
  source 1..20: mol_type = genomic DNA
cacacaagaaaagtaactgc

SEQ ID NO: 163277 - DNA, 20 bp, Homo sapiens
  source 1..20: mol_type = genomic DNA
acacaagaaaagtaactgca

SEQ ID NO: 163278 - DNA, 20 bp, Homo sapiens
  source 1..20: mol_type = genomic DNA
cacaagaaaagtaactgcac

SEQ ID NO: 163279 - DNA, 20 bp, Homo sapiens
  source 1..20: mol_type = genomic DNA
acaagaaaagtaactgcact

SEQ ID NO: 163280 - DNA, 20 bp, Homo sapiens
  source 1..20: mol_type = genomic DNA
caagaaaagtaactgcacta

SEQ ID NO: 163281 - DNA, 20 bp, Homo sapiens
  source 1..20: mol_type = genomic DNA
aagaaaagtaactgcactag

SEQ ID NO: 163282 - DNA, 20 bp, Homo sapiens
  source 1..20: mol_type = genomic DNA
agaaaagtaactgcactaga

SEQ ID NO: 163283 - DNA, 20 bp, Homo sapiens
  source 1..20: mol_type = genomic DNA
gaaaagtaactgcactagat

SEQ ID NO: 163284 - DNA, 20 bp, Homo sapiens
  source 1..20: mol_type = genomic DNA
aaaagtaactgcactagatt

SEQ ID NO: 163285 - DNA, 20 bp, Homo sapiens
  source 1..20: mol_type = genomic DNA
aaagtaactgcactagattg

SEQ ID NO: 163286 - DNA, 20 bp, Homo sapiens
  source 1..20: mol_type = genomic DNA
aagtaactgcactagattgt

SEQ ID NO: 163287 - DNA, 20 bp, Homo sapiens
  source 1..20: mol_type = genomic DNA
agtaactgcactagattgtg

SEQ ID NO: 163288 - DNA, 20 bp, Homo sapiens
  source 1..20: mol_type = genomic DNA
gtaactgcactagattgtga

SEQ ID NO: 163289 - DNA, 20 bp, Homo sapiens
  source 1..20: mol_type = genomic DNA
taactgcactagattgtgaa

SEQ ID NO: 163290 - DNA, 20 bp, Homo sapiens
  source 1..20: mol_type = genomic DNA
aactgcactagattgtgaag

SEQ ID NO: 163291 - DNA, 20 bp, Homo sapiens
  source 1..20: mol_type = genomic DNA
actgcactagattgtgaaga

SEQ ID NO: 163292 - DNA, 20 bp, Homo sapiens
  source 1..20: mol_type = genomic DNA
ctgcactagattgtgaagac

SEQ ID NO: 163293 - DNA, 20 bp, Homo sapiens
  source 1..20: mol_type = genomic DNA
tgcactagattgtgaagact

SEQ ID NO: 163294 - DNA, 20 bp, Homo sapiens
  source 1..20: mol_type = genomic DNA
gcactagattgtgaagactg

SEQ ID NO: 163295 - DNA, 20 bp, Homo sapiens
  source 1..20: mol_type = genomic DNA
cactagattgtgaagactgg

SEQ ID NO: 163296 - DNA, 20 bp, Homo sapiens
  source 1..20: mol_type = genomic DNA
actagattgtgaagactggg

SEQ ID NO: 163297 - DNA, 20 bp, Homo sapiens
  source 1..20: mol_type = genomic DNA
ctagattgtgaagactgggg

SEQ ID NO: 163298 - DNA, 20 bp, Homo sapiens
  source 1..20: mol_type = genomic DNA
tagattgtgaagactggggt

SEQ ID NO: 163299 - DNA, 20 bp, Homo sapiens
  source 1..20: mol_type = genomic DNA
agattgtgaagactggggtg

SEQ ID NO: 163300 - DNA, 20 bp, Homo sapiens
  source 1..20: mol_type = genomic DNA
gattgtgaagactggggtgg

SEQ ID NO: 163301 - DNA, 20 bp, Homo sapiens
  source 1..20: mol_type = genomic DNA
attgtgaagactggggtgga

SEQ ID NO: 163302 - DNA, 20 bp, Homo sapiens
  source 1..20: mol_type = genomic DNA
ttgtgaagactggggtggac

SEQ ID NO: 163303 - DNA, 20 bp, Homo sapiens
  source 1..20: mol_type = genomic DNA
tgtgaagactggggtggacc

SEQ ID NO: 163304 - DNA, 20 bp, Homo sapiens
  source 1..20: mol_type = genomic DNA
gtgaagactggggtggacct

SEQ ID NO: 163305 - DNA, 20 bp, Homo sapiens
  source 1..20: mol_type = genomic DNA
tgaagactggggtggacctg

SEQ ID NO: 163306 - DNA, 20 bp, Homo sapiens
  source 1..20: mol_type = genomic DNA
gaagactggggtggacctgc

SEQ ID NO: 163307 - DNA, 20 bp, Homo sapiens
  source 1..20: mol_type = genomic DNA
aagactggggtggacctgct

SEQ ID NO: 163308 - DNA, 20 bp, Homo sapiens
  source 1..20: mol_type = genomic DNA
agactggggtggacctgctt

SEQ ID NO: 163309 - DNA, 20 bp, Homo sapiens
  source 1..20: mol_type = genomic DNA
gactggggtggacctgcttc

SEQ ID NO: 163310 - DNA, 20 bp, Homo sapiens
  source 1..20: mol_type = genomic DNA
actggggtggacctgcttct

SEQ ID NO: 163311 - DNA, 20 bp, Homo sapiens
  source 1..20: mol_type = genomic DNA
ctggggtggacctgcttctg

SEQ ID NO: 163312 - DNA, 20 bp, Homo sapiens
  source 1..20: mol_type = genomic DNA
tggggtggacctgcttctga

SEQ ID NO: 163313 - DNA, 20 bp, Homo sapiens
  source 1..20: mol_type = genomic DNA
ggggtggacctgcttctgaa

SEQ ID NO: 163314 - DNA, 20 bp, Homo sapiens
  source 1..20: mol_type = genomic DNA
gggtggacctgcttctgaag

SEQ ID NO: 163315 - DNA, 20 bp, Homo sapiens
  source 1..20: mol_type = genomic DNA
ggtggacctgcttctgaagg

SEQ ID NO: 163316 - DNA, 20 bp, Homo sapiens
  source 1..20: mol_type = genomic DNA
gtggacctgcttctgaaggt

SEQ ID NO: 163317 - DNA, 20 bp, Homo sapiens
  source 1..20: mol_type = genomic DNA
tggacctgcttctgaaggtc

SEQ ID NO: 163318 - DNA, 20 bp, Homo sapiens
  source 1..20: mol_type = genomic DNA
ggacctgcttctgaaggtcc

SEQ ID NO: 163319 - DNA, 20 bp, Homo sapiens
  source 1..20: mol_type = genomic DNA
gacctgcttctgaaggtcca

SEQ ID NO: 163320 - DNA, 20 bp, Homo sapiens
  source 1..20: mol_type = genomic DNA
acctgcttctgaaggtccag

SEQ ID NO: 163321 - DNA, 20 bp, Homo sapiens
  source 1..20: mol_type = genomic DNA
cctgcttctgaaggtccagt

SEQ ID NO: 163322 - DNA, 20 bp, Homo sapiens
  source 1..20: mol_type = genomic DNA
ctgcttctgaaggtccagtg

SEQ ID NO: 163323 - DNA, 20 bp, Homo sapiens
  source 1..20: mol_type = genomic DNA
tgcttctgaaggtccagtgc

SEQ ID NO: 163324 - DNA, 20 bp, Homo sapiens
  source 1..20: mol_type = genomic DNA
gcttctgaaggtccagtgcc

SEQ ID NO: 163325 - DNA, 20 bp, Homo sapiens
  source 1..20: mol_type = genomic DNA
cttctgaaggtccagtgccc

SEQ ID NO: 163326 - DNA, 20 bp, Homo sapiens
  source 1..20: mol_type = genomic DNA
ttctgaaggtccagtgccct

SEQ ID NO: 163327 - DNA, 20 bp, Homo sapiens
  source 1..20: mol_type = genomic DNA
tctgaaggtccagtgccctt

SEQ ID NO: 163328 - DNA, 20 bp, Homo sapiens
  source 1..20: mol_type = genomic DNA
ctgaaggtccagtgcccttt

SEQ ID NO: 163329 - DNA, 20 bp, Homo sapiens
  source 1..20: mol_type = genomic DNA
tgaaggtccagtgccctttg

SEQ ID NO: 163330 - DNA, 20 bp, Homo sapiens
  source 1..20: mol_type = genomic DNA
gaaggtccagtgccctttgt

SEQ ID NO: 163331 - DNA, 20 bp, Homo sapiens
  source 1..20: mol_type = genomic DNA
aaggtccagtgccctttgtc

SEQ ID NO: 163332 - DNA, 20 bp, Homo sapiens
  source 1..20: mol_type = genomic DNA
aggtccagtgccctttgtct

SEQ ID NO: 163333 - DNA, 20 bp, Homo sapiens
  source 1..20: mol_type = genomic DNA
ggtccagtgccctttgtctt

SEQ ID NO: 163334 - DNA, 20 bp, Homo sapiens
  source 1..20: mol_type = genomic DNA
gtccagtgccctttgtctta

SEQ ID NO: 163335 - DNA, 20 bp, Homo sapiens
  source 1..20: mol_type = genomic DNA
tccagtgccctttgtcttaa

SEQ ID NO: 163336 - DNA, 20 bp, Homo sapiens
  source 1..20: mol_type = genomic DNA
ccagtgccctttgtcttaag

SEQ ID NO: 163337 - DNA, 20 bp, Homo sapiens
  source 1..20: mol_type = genomic DNA
cagtgccctttgtcttaaga

SEQ ID NO: 163338 - DNA, 20 bp, Homo sapiens
  source 1..20: mol_type = genomic DNA
agtgccctttgtcttaagat

SEQ ID NO: 163339 - DNA, 20 bp, Homo sapiens
  source 1..20: mol_type = genomic DNA
gtgccctttgtcttaagatt

SEQ ID NO: 163340 - DNA, 20 bp, Homo sapiens
  source 1..20: mol_type = genomic DNA
tgccctttgtcttaagattt

SEQ ID NO: 163341 - DNA, 20 bp, Homo sapiens
  source 1..20: mol_type = genomic DNA
gccctttgtcttaagatttg

SEQ ID NO: 163342 - DNA, 20 bp, Homo sapiens
  source 1..20: mol_type = genomic DNA
ccctttgtcttaagatttgg

SEQ ID NO: 163343 - DNA, 20 bp, Homo sapiens
  source 1..20: mol_type = genomic DNA
cctttgtcttaagatttggt

SEQ ID NO: 163344 - DNA, 20 bp, Homo sapiens
  source 1..20: mol_type = genomic DNA
ctttgtcttaagatttggtg

SEQ ID NO: 163345 - DNA, 20 bp, Homo sapiens
  source 1..20: mol_type = genomic DNA
tttgtcttaagatttggtgt

SEQ ID NO: 163346 - DNA, 20 bp, Homo sapiens
  source 1..20: mol_type = genomic DNA
ttgtcttaagatttggtgta

SEQ ID NO: 163347 - DNA, 20 bp, Homo sapiens
  source 1..20: mol_type = genomic DNA
tgtcttaagatttggtgtag

SEQ ID NO: 163348 - DNA, 20 bp, Homo sapiens
  source 1..20: mol_type = genomic DNA
gtcttaagatttggtgtagt

SEQ ID NO: 163349 - DNA, 20 bp, Homo sapiens
  source 1..20: mol_type = genomic DNA
tcttaagatttggtgtagtg

SEQ ID NO: 163350 - DNA, 20 bp, Homo sapiens
  source 1..20: mol_type = genomic DNA
cttaagatttggtgtagtgt

SEQ ID NO: 163351 - DNA, 20 bp, Homo sapiens
  source 1..20: mol_type = genomic DNA
ttaagatttggtgtagtgtg

SEQ ID NO: 163352 - DNA, 20 bp, Homo sapiens
  source 1..20: mol_type = genomic DNA
taagatttggtgtagtgtgt

SEQ ID NO: 163353 - DNA, 20 bp, Homo sapiens
  source 1..20: mol_type = genomic DNA
aagatttggtgtagtgtgtc

SEQ ID NO: 163354 - DNA, 20 bp, Homo sapiens
  source 1..20: mol_type = genomic DNA
agatttggtgtagtgtgtct

SEQ ID NO: 163355 - DNA, 20 bp, Homo sapiens
  source 1..20: mol_type = genomic DNA
gatttggtgtagtgtgtctt

SEQ ID NO: 163356 - DNA, 20 bp, Homo sapiens
  source 1..20: mol_type = genomic DNA
atttggtgtagtgtgtcttt

SEQ ID NO: 163357 - DNA, 20 bp, Homo sapiens
  source 1..20: mol_type = genomic DNA
tttggtgtagtgtgtcttta

SEQ ID NO: 163358 - DNA, 20 bp, Homo sapiens
  source 1..20: mol_type = genomic DNA
ttggtgtagtgtgtctttag

SEQ ID NO: 163359 - DNA, 20 bp, Homo sapiens
  source 1..20: mol_type = genomic DNA
tggtgtagtgtgtctttaga

SEQ ID NO: 163360 - DNA, 20 bp, Homo sapiens
  source 1..20: mol_type = genomic DNA
ggtgtagtgtgtctttagaa

SEQ ID NO: 163361 - DNA, 20 bp, Homo sapiens
  source 1..20: mol_type = genomic DNA
gtgtagtgtgtctttagaaa

SEQ ID NO: 163362 - DNA, 20 bp, Homo sapiens
  source 1..20: mol_type = genomic DNA
tgtagtgtgtctttagaaac

SEQ ID NO: 163363 - DNA, 20 bp, Homo sapiens
  source 1..20: mol_type = genomic DNA
gtagtgtgtctttagaaacc

SEQ ID NO: 163364 - DNA, 20 bp, Homo sapiens
  source 1..20: mol_type = genomic DNA
tagtgtgtctttagaaacca

SEQ ID NO: 163365 - DNA, 20 bp, Homo sapiens
  source 1..20: mol_type = genomic DNA
agtgtgtctttagaaaccaa

SEQ ID NO: 163366 - DNA, 20 bp, Homo sapiens
  source 1..20: mol_type = genomic DNA
gtgtgtctttagaaaccaaa

SEQ ID NO: 163367 - DNA, 20 bp, Homo sapiens
  source 1..20: mol_type = genomic DNA
tgtgtctttagaaaccaaaa

SEQ ID NO: 163368 - DNA, 20 bp, Homo sapiens
  source 1..20: mol_type = genomic DNA
gtgtctttagaaaccaaaaa

SEQ ID NO: 163369 - DNA, 20 bp, Homo sapiens
  source 1..20: mol_type = genomic DNA
tgtctttagaaaccaaaaaa

SEQ ID NO: 163370 - DNA, 20 bp, Homo sapiens
  source 1..20: mol_type = genomic DNA
gtctttagaaaccaaaaaaa

SEQ ID NO: 163371 - DNA, 20 bp, Homo sapiens
  source 1..20: mol_type = genomic DNA
tctttagaaaccaaaaaaag

SEQ ID NO: 163372 - DNA, 20 bp, Homo sapiens
  source 1..20: mol_type = genomic DNA
ctttagaaaccaaaaaaaga

SEQ ID NO: 163373 - DNA, 20 bp, Homo sapiens
  source 1..20: mol_type = genomic DNA
tttagaaaccaaaaaaagag

SEQ ID NO: 163374 - DNA, 20 bp, Homo sapiens
  source 1..20: mol_type = genomic DNA
ttagaaaccaaaaaaagaga

SEQ ID NO: 163375 - DNA, 20 bp, Homo sapiens
  source 1..20: mol_type = genomic DNA
tagaaaccaaaaaaagagaa

SEQ ID NO: 163376 - DNA, 20 bp, Homo sapiens
  source 1..20: mol_type = genomic DNA
agaaaccaaaaaaagagaag

SEQ ID NO: 163377 - DNA, 20 bp, Homo sapiens
  source 1..20: mol_type = genomic DNA
gaaaccaaaaaaagagaaga

SEQ ID NO: 163378 - DNA, 20 bp, Homo sapiens
  source 1..20: mol_type = genomic DNA
aaaccaaaaaaagagaagaa

SEQ ID NO: 163379 - DNA, 20 bp, Homo sapiens
  source 1..20: mol_type = genomic DNA
aaccaaaaaaagagaagaag

SEQ ID NO: 163380 - DNA, 20 bp, Homo sapiens
  source 1..20: mol_type = genomic DNA
accaaaaaaagagaagaaga

SEQ ID NO: 163381 - DNA, 20 bp, Homo sapiens
  source 1..20: mol_type = genomic DNA
ccaaaaaaagagaagaagat

SEQ ID NO: 163382 - DNA, 20 bp, Homo sapiens
  source 1..20: mol_type = genomic DNA
caaaaaaagagaagaagatc

SEQ ID NO: 163383 - DNA, 20 bp, Homo sapiens
  source 1..20: mol_type = genomic DNA
aaaaaaagagaagaagatca

SEQ ID NO: 163384 - DNA, 20 bp, Homo sapiens
  source 1..20: mol_type = genomic DNA
aaaaaagagaagaagatcaa

SEQ ID NO: 163385 - DNA, 20 bp, Homo sapiens
  source 1..20: mol_type = genomic DNA
aaaaagagaagaagatcaac

SEQ ID NO: 163386 - DNA, 20 bp, Homo sapiens
  source 1..20: mol_type = genomic DNA
aaaagagaagaagatcaacc

SEQ ID NO: 163387 - DNA, 20 bp, Homo sapiens
  source 1..20: mol_type = genomic DNA
aaagagaagaagatcaacct

SEQ ID NO: 163388 - DNA, 20 bp, Homo sapiens
  source 1..20: mol_type = genomic DNA
aagagaagaagatcaacctt

SEQ ID NO: 163389 - DNA, 20 bp, Homo sapiens
  source 1..20: mol_type = genomic DNA
agagaagaagatcaacctta

SEQ ID NO: 163390 - DNA, 20 bp, Homo sapiens
  source 1..20: mol_type = genomic DNA
gagaagaagatcaaccttaa

SEQ ID NO: 163391 - DNA, 20 bp, Homo sapiens
  source 1..20: mol_type = genomic DNA
agaagaagatcaaccttaag

SEQ ID NO: 163392 - DNA, 20 bp, Homo sapiens
  source 1..20: mol_type = genomic DNA
gaagaagatcaaccttaaga

SEQ ID NO: 163393 - DNA, 20 bp, Homo sapiens
  source 1..20: mol_type = genomic DNA
aagaagatcaaccttaagat

SEQ ID NO: 163394 - DNA, 20 bp, Homo sapiens
  source 1..20: mol_type = genomic DNA
agaagatcaaccttaagatt

SEQ ID NO: 163395 - DNA, 20 bp, Homo sapiens
  source 1..20: mol_type = genomic DNA
gaagatcaaccttaagatta

SEQ ID NO: 163396 - DNA, 20 bp, Homo sapiens
  source 1..20: mol_type = genomic DNA
aagatcaaccttaagattag

SEQ ID NO: 163397 - DNA, 20 bp, Homo sapiens
  source 1..20: mol_type = genomic DNA
agatcaaccttaagattagc

SEQ ID NO: 163398 - DNA, 20 bp, Homo sapiens
  source 1..20: mol_type = genomic DNA
gatcaaccttaagattagcc

SEQ ID NO: 163399 - DNA, 20 bp, Homo sapiens
  source 1..20: mol_type = genomic DNA
atcaaccttaagattagcca

SEQ ID NO: 163400 - DNA, 20 bp, Homo sapiens
  source 1..20: mol_type = genomic DNA
tcaaccttaagattagccac

SEQ ID NO: 163401 - DNA, 20 bp, Homo sapiens
  source 1..20: mol_type = genomic DNA
caaccttaagattagccaca

SEQ ID NO: 163402 - DNA, 20 bp, Homo sapiens
  source 1..20: mol_type = genomic DNA
aaccttaagattagccacaa

SEQ ID NO: 163403 - DNA, 20 bp, Homo sapiens
  source 1..20: mol_type = genomic DNA
accttaagattagccacaaa

SEQ ID NO: 163404 - DNA, 20 bp, Homo sapiens
  source 1..20: mol_type = genomic DNA
ccttaagattagccacaaaa

SEQ ID NO: 163405 - DNA, 20 bp, Homo sapiens
  source 1..20: mol_type = genomic DNA
cttaagattagccacaaaac

SEQ ID NO: 163406 - DNA, 20 bp, Homo sapiens
  source 1..20: mol_type = genomic DNA
ttaagattagccacaaaact

SEQ ID NO: 163407 - DNA, 20 bp, Homo sapiens
  source 1..20: mol_type = genomic DNA
taagattagccacaaaactg

SEQ ID NO: 163408 - DNA, 20 bp, Homo sapiens
  source 1..20: mol_type = genomic DNA
aagattagccacaaaactgg

SEQ ID NO: 163409 - DNA, 20 bp, Homo sapiens
  source 1..20: mol_type = genomic DNA
agattagccacaaaactggg

SEQ ID NO: 163410 - DNA, 20 bp, Homo sapiens
  source 1..20: mol_type = genomic DNA
gattagccacaaaactgggc

SEQ ID NO: 163411 - DNA, 20 bp, Homo sapiens
  source 1..20: mol_type = genomic DNA
attagccacaaaactgggct

SEQ ID NO: 163412 - DNA, 20 bp, Homo sapiens
  source 1..20: mol_type = genomic DNA
ttagccacaaaactgggctt

SEQ ID NO: 163413 - DNA, 20 bp, Homo sapiens
  source 1..20: mol_type = genomic DNA
tagccacaaaactgggcttt

SEQ ID NO: 163414 - DNA, 20 bp, Homo sapiens
  source 1..20: mol_type = genomic DNA
agccacaaaactgggctttg

SEQ ID NO: 163415 - DNA, 20 bp, Homo sapiens
  source 1..20: mol_type = genomic DNA
gccacaaaactgggctttga

SEQ ID NO: 163416 - DNA, 20 bp, Homo sapiens
  source 1..20: mol_type = genomic DNA
ccacaaaactgggctttgat

SEQ ID NO: 163417 - DNA, 20 bp, Homo sapiens
  source 1..20: mol_type = genomic DNA
cacaaaactgggctttgata

SEQ ID NO: 163418 - DNA, 20 bp, Homo sapiens
  source 1..20: mol_type = genomic DNA
acaaaactgggctttgatac

SEQ ID NO: 163419 - DNA, 20 bp, Homo sapiens
  source 1..20: mol_type = genomic DNA
caaaactgggctttgatacc

SEQ ID NO: 163420 - DNA, 20 bp, Homo sapiens
  source 1..20: mol_type = genomic DNA
aaaactgggctttgatacct

SEQ ID NO: 163421 - DNA, 20 bp, Homo sapiens
  source 1..20: mol_type = genomic DNA
aaactgggctttgataccta

SEQ ID NO: 163422 - DNA, 20 bp, Homo sapiens
  source 1..20: mol_type = genomic DNA
aactgggctttgatacctag

SEQ ID NO: 163423 - DNA, 20 bp, Homo sapiens
  source 1..20: mol_type = genomic DNA
actgggctttgatacctagg

SEQ ID NO: 163424 - DNA, 20 bp, Homo sapiens
  source 1..20: mol_type = genomic DNA
ctgggctttgatacctaggt

SEQ ID NO: 163425 - DNA, 20 bp, Homo sapiens
  source 1..20: mol_type = genomic DNA
tgggctttgatacctaggtg

SEQ ID NO: 163426 - DNA, 20 bp, Homo sapiens
  source 1..20: mol_type = genomic DNA
gggctttgatacctaggtgt

SEQ ID NO: 163427 - DNA, 20 bp, Homo sapiens
  source 1..20: mol_type = genomic DNA
ggctttgatacctaggtgtg

SEQ ID NO: 163428 - DNA, 20 bp, Homo sapiens
  source 1..20: mol_type = genomic DNA
gctttgatacctaggtgtgg

SEQ ID NO: 163429 - DNA, 20 bp, Homo sapiens
  source 1..20: mol_type = genomic DNA
ctttgatacctaggtgtgga

SEQ ID NO: 163430 - DNA, 20 bp, Homo sapiens
  source 1..20: mol_type = genomic DNA
tttgatacctaggtgtggaa

SEQ ID NO: 163431 - DNA, 20 bp, Homo sapiens
  source 1..20: mol_type = genomic DNA
ttgatacctaggtgtggaaa

SEQ ID NO: 163432 - DNA, 20 bp, Homo sapiens
  source 1..20: mol_type = genomic DNA
tgatacctaggtgtggaaaa

SEQ ID NO: 163433 - DNA, 20 bp, Homo sapiens
  source 1..20: mol_type = genomic DNA
gatacctaggtgtggaaaag

SEQ ID NO: 163434 - DNA, 20 bp, Homo sapiens
  source 1..20: mol_type = genomic DNA
atacctaggtgtggaaaaga

SEQ ID NO: 163435 - DNA, 20 bp, Homo sapiens
  source 1..20: mol_type = genomic DNA
tacctaggtgtggaaaagaa

SEQ ID NO: 163436 - DNA, 20 bp, Homo sapiens
  source 1..20: mol_type = genomic DNA
acctaggtgtggaaaagaaa

SEQ ID NO: 163437 - DNA, 20 bp, Homo sapiens
  source 1..20: mol_type = genomic DNA
cctaggtgtggaaaagaaag

SEQ ID NO: 163438 - DNA, 20 bp, Homo sapiens
  source 1..20: mol_type = genomic DNA
ctaggtgtggaaaagaaagg

SEQ ID NO: 163439 - DNA, 20 bp, Homo sapiens
  source 1..20: mol_type = genomic DNA
taggtgtggaaaagaaaggg

SEQ ID NO: 163440 - DNA, 20 bp, Homo sapiens
  source 1..20: mol_type = genomic DNA
aggtgtggaaaagaaaggga

SEQ ID NO: 163441 - DNA, 20 bp, Homo sapiens
  source 1..20: mol_type = genomic DNA
ggtgtggaaaagaaagggaa

SEQ ID NO: 163442 - DNA, 20 bp, Homo sapiens
  source 1..20: mol_type = genomic DNA
gtgtggaaaagaaagggaaa

SEQ ID NO: 163443 - DNA, 20 bp, Homo sapiens
  source 1..20: mol_type = genomic DNA
tgtggaaaagaaagggaaag

SEQ ID NO: 163444 - DNA, 20 bp, Homo sapiens
  source 1..20: mol_type = genomic DNA
gtggaaaagaaagggaaaga

SEQ ID NO: 163445 - DNA, 20 bp, Homo sapiens
  source 1..20: mol_type = genomic DNA
tggaaaagaaagggaaagag

SEQ ID NO: 163446 - DNA, 20 bp, Homo sapiens
  source 1..20: mol_type = genomic DNA
ggaaaagaaagggaaagagt

SEQ ID NO: 163447 - DNA, 20 bp, Homo sapiens
  source 1..20: mol_type = genomic DNA
gaaaagaaagggaaagagtt

SEQ ID NO: 163448 - DNA, 20 bp, Homo sapiens
  source 1..20: mol_type = genomic DNA
aaaagaaagggaaagagttg

SEQ ID NO: 163449 - DNA, 20 bp, Homo sapiens
  source 1..20: mol_type = genomic DNA
aaagaaagggaaagagttga

SEQ ID NO: 163450 - DNA, 20 bp, Homo sapiens
  source 1..20: mol_type = genomic DNA
aagaaagggaaagagttgat

SEQ ID NO: 163451 - DNA, 20 bp, Homo sapiens
  source 1..20: mol_type = genomic DNA
agaaagggaaagagttgatg

SEQ ID NO: 163452 - DNA, 20 bp, Homo sapiens
  source 1..20: mol_type = genomic DNA
gaaagggaaagagttgatgt

SEQ ID NO: 163453 - DNA, 20 bp, Homo sapiens
  source 1..20: mol_type = genomic DNA
aaagggaaagagttgatgtt

SEQ ID NO: 163454 - DNA, 20 bp, Homo sapiens
  source 1..20: mol_type = genomic DNA
aagggaaagagttgatgttt

SEQ ID NO: 163455 - DNA, 20 bp, Homo sapiens
  source 1..20: mol_type = genomic DNA
agggaaagagttgatgtttt

SEQ ID NO: 163456 - DNA, 20 bp, Homo sapiens
  source 1..20: mol_type = genomic DNA
gggaaagagttgatgttttg

SEQ ID NO: 163457 - DNA, 20 bp, Homo sapiens
  source 1..20: mol_type = genomic DNA
ggaaagagttgatgttttgt

SEQ ID NO: 163458 - DNA, 20 bp, Homo sapiens
  source 1..20: mol_type = genomic DNA
gaaagagttgatgttttgtc

SEQ ID NO: 163459 - DNA, 20 bp, Homo sapiens
  source 1..20: mol_type = genomic DNA
aaagagttgatgttttgtct

SEQ ID NO: 163460 - DNA, 20 bp, Homo sapiens
  source 1..20: mol_type = genomic DNA
aagagttgatgttttgtctt

SEQ ID NO: 163461 - DNA, 20 bp, Homo sapiens
  source 1..20: mol_type = genomic DNA
agagttgatgttttgtctta

SEQ ID NO: 163462 - DNA, 20 bp, Homo sapiens
  source 1..20: mol_type = genomic DNA
gagttgatgttttgtcttac

SEQ ID NO: 163463 - DNA, 20 bp, Homo sapiens
  source 1..20: mol_type = genomic DNA
agttgatgttttgtcttaca

SEQ ID NO: 163464 - DNA, 20 bp, Homo sapiens
  source 1..20: mol_type = genomic DNA
gttgatgttttgtcttacag

SEQ ID NO: 163465 - DNA, 20 bp, Homo sapiens
  source 1..20: mol_type = genomic DNA
ttgatgttttgtcttacagc

SEQ ID NO: 163466 - DNA, 20 bp, Homo sapiens
  source 1..20: mol_type = genomic DNA
tgatgttttgtcttacagca

SEQ ID NO: 163467 - DNA, 20 bp, Homo sapiens
  source 1..20: mol_type = genomic DNA
gatgttttgtcttacagcat

SEQ ID NO: 163468 - DNA, 20 bp, Homo sapiens
  source 1..20: mol_type = genomic DNA
atgttttgtcttacagcatc

SEQ ID NO: 163469 - DNA, 20 bp, Homo sapiens
  source 1..20: mol_type = genomic DNA
tgttttgtcttacagcatca

SEQ ID NO: 163470 - DNA, 20 bp, Homo sapiens
  source 1..20: mol_type = genomic DNA
gttttgtcttacagcatcat

SEQ ID NO: 163471 - DNA, 20 bp, Homo sapiens
  source 1..20: mol_type = genomic DNA
ttttgtcttacagcatcatt

SEQ ID NO: 163472 - DNA, 20 bp, Homo sapiens
  source 1..20: mol_type = genomic DNA
tttgtcttacagcatcattg

SEQ ID NO: 163473 - DNA, 20 bp, Homo sapiens
  source 1..20: mol_type = genomic DNA
ttgtcttacagcatcattgt

SEQ ID NO: 163474 - DNA, 20 bp, Homo sapiens
  source 1..20: mol_type = genomic DNA
tgtcttacagcatcattgta

SEQ ID NO: 163475 - DNA, 20 bp, Homo sapiens
  source 1..20: mol_type = genomic DNA
gtcttacagcatcattgtag

SEQ ID NO: 163476 - DNA, 20 bp, Homo sapiens
  source 1..20: mol_type = genomic DNA
tcttacagcatcattgtaga

SEQ ID NO: 163477 - DNA, 20 bp, Homo sapiens
  source 1..20: mol_type = genomic DNA
cttacagcatcattgtagaa

SEQ ID NO: 163478 - DNA, 20 bp, Homo sapiens
  source 1..20: mol_type = genomic DNA
ttacagcatcattgtagaag

SEQ ID NO: 163479 - DNA, 20 bp, Homo sapiens
  source 1..20: mol_type = genomic DNA
tacagcatcattgtagaaga

SEQ ID NO: 163480 - DNA, 20 bp, Homo sapiens
  source 1..20: mol_type = genomic DNA
acagcatcattgtagaagag

SEQ ID NO: 163481 - DNA, 20 bp, Homo sapiens
  source 1..20: mol_type = genomic DNA
cagcatcattgtagaagagg

SEQ ID NO: 163482 - DNA, 20 bp, Homo sapiens
  source 1..20: mol_type = genomic DNA
agcatcattgtagaagaggg

SEQ ID NO: 163483 - DNA, 20 bp, Homo sapiens
  source 1..20: mol_type = genomic DNA
gcatcattgtagaagagggt

SEQ ID NO: 163484 - DNA, 20 bp, Homo sapiens
  source 1..20: mol_type = genomic DNA
catcattgtagaagagggtg

SEQ ID NO: 163485 - DNA, 20 bp, Homo sapiens
  source 1..20: mol_type = genomic DNA
atcattgtagaagagggtgt

SEQ ID NO: 163486 - DNA, 20 bp, Homo sapiens
  source 1..20: mol_type = genomic DNA
tcattgtagaagagggtgtt

SEQ ID NO: 163487 - DNA, 20 bp, Homo sapiens
  source 1..20: mol_type = genomic DNA
cattgtagaagagggtgttt

SEQ ID NO: 163488 - DNA, 20 bp, Homo sapiens
  source 1..20: mol_type = genomic DNA
attgtagaagagggtgtttt

SEQ ID NO: 163489 - DNA, 20 bp, Homo sapiens
  source 1..20: mol_type = genomic DNA
ttgtagaagagggtgttttt

SEQ ID NO: 163490 - DNA, 20 bp, Homo sapiens
  source 1..20: mol_type = genomic DNA
tgtagaagagggtgtttttt

SEQ ID NO: 163491 - DNA, 20 bp, Homo sapiens
  source 1..20: mol_type = genomic DNA
gtagaagagggtgttttttt

SEQ ID NO: 163492 - DNA, 20 bp, Homo sapiens
  source 1..20: mol_type = genomic DNA
tagaagagggtgtttttttg

SEQ ID NO: 163493 - DNA, 20 bp, Homo sapiens
  source 1..20: mol_type = genomic DNA
agaagagggtgtttttttgt

SEQ ID NO: 163494 - DNA, 20 bp, Homo sapiens
  source 1..20: mol_type = genomic DNA
gaagagggtgtttttttgtt

SEQ ID NO: 163495 - DNA, 20 bp, Homo sapiens
  source 1..20: mol_type = genomic DNA
aagagggtgtttttttgttt

SEQ ID NO: 163496 - DNA, 20 bp, Homo sapiens
  source 1..20: mol_type = genomic DNA
agagggtgtttttttgtttg

SEQ ID NO: 163497 - DNA, 20 bp, Homo sapiens
  source 1..20: mol_type = genomic DNA
gagggtgtttttttgtttgt

SEQ ID NO: 163498 - DNA, 20 bp, Homo sapiens
  source 1..20: mol_type = genomic DNA
agggtgtttttttgtttgtt

SEQ ID NO: 163499 - DNA, 20 bp, Homo sapiens
  source 1..20: mol_type = genomic DNA
gggtgtttttttgtttgttt

SEQ ID NO: 163500 - DNA, 20 bp, Homo sapiens
  source 1..20: mol_type = genomic DNA
ggtgtttttttgtttgtttg

SEQ ID NO: 163501 - DNA, 20 bp, Homo sapiens
  source 1..20: mol_type = genomic DNA
gtgtttttttgtttgtttgt

SEQ ID NO: 163502 - DNA, 20 bp, Homo sapiens
  source 1..20: mol_type = genomic DNA
tgtttttttgtttgtttgtt

SEQ ID NO: 163503 - DNA, 20 bp, Homo sapiens
  source 1..20: mol_type = genomic DNA
gtttttttgtttgtttgttt

SEQ ID NO: 163504 - DNA, 20 bp, Homo sapiens
  source 1..20: mol_type = genomic DNA
tttttttgtttgtttgtttt

SEQ ID NO: 163505 - DNA, 20 bp, Homo sapiens
  source 1..20: mol_type = genomic DNA
ttttttgtttgtttgttttt

SEQ ID NO: 163506 - DNA, 20 bp, Homo sapiens
  source 1..20: mol_type = genomic DNA
tttttgtttgtttgtttttt

SEQ ID NO: 163507 - DNA, 20 bp, Homo sapiens
  source 1..20: mol_type = genomic DNA
ttttgtttgtttgttttttg

SEQ ID NO: 163508 - DNA, 20 bp, Homo sapiens
  source 1..20: mol_type = genomic DNA
tttgtttgtttgttttttga

SEQ ID NO: 163509 - DNA, 20 bp, Homo sapiens
  source 1..20: mol_type = genomic DNA
ttgtttgtttgttttttgag

SEQ ID NO: 163510 - DNA, 20 bp, Homo sapiens
  source 1..20: mol_type = genomic DNA
tgtttgtttgttttttgaga

SEQ ID NO: 163511 - DNA, 20 bp, Homo sapiens
  source 1..20: mol_type = genomic DNA
gtttgtttgttttttgagac

SEQ ID NO: 163512 - DNA, 20 bp, Homo sapiens
  source 1..20: mol_type = genomic DNA
tttgtttgttttttgagacg

SEQ ID NO: 163513 - DNA, 20 bp, Homo sapiens
  source 1..20: mol_type = genomic DNA
ttgtttgttttttgagacgg

SEQ ID NO: 163514 - DNA, 20 bp, Homo sapiens
  source 1..20: mol_type = genomic DNA
tgtttgttttttgagacgga

SEQ ID NO: 163515 - DNA, 20 bp, Homo sapiens
  source 1..20: mol_type = genomic DNA
gtttgttttttgagacggag

SEQ ID NO: 163516 - DNA, 20 bp, Homo sapiens
  source 1..20: mol_type = genomic DNA
tttgttttttgagacggagt

SEQ ID NO: 163517 - DNA, 20 bp, Homo sapiens
  source 1..20: mol_type = genomic DNA
ttgttttttgagacggagtc

SEQ ID NO: 163518 - DNA, 20 bp, Homo sapiens
  source 1..20: mol_type = genomic DNA
tgttttttgagacggagtct

SEQ ID NO: 163519 - DNA, 20 bp, Homo sapiens
  source 1..20: mol_type = genomic DNA
gttttttgagacggagtctt

SEQ ID NO: 163520 - DNA, 20 bp, Homo sapiens
  source 1..20: mol_type = genomic DNA
ttttttgagacggagtctta

SEQ ID NO: 163521 - DNA, 20 bp, Homo sapiens
  source 1..20: mol_type = genomic DNA
tttttgagacggagtcttac

SEQ ID NO: 163522 - DNA, 20 bp, Homo sapiens
  source 1..20: mol_type = genomic DNA
ttttgagacggagtcttact

SEQ ID NO: 163523 - DNA, 20 bp, Homo sapiens
  source 1..20: mol_type = genomic DNA
tttgagacggagtcttactc

SEQ ID NO: 163524 - DNA, 20 bp, Homo sapiens
  source 1..20: mol_type = genomic DNA
ttgagacggagtcttactct

SEQ ID NO: 163525 - DNA, 20 bp, Homo sapiens
  source 1..20: mol_type = genomic DNA
tgagacggagtcttactctg

SEQ ID NO: 163526 - DNA, 20 bp, Homo sapiens
  source 1..20: mol_type = genomic DNA
gagacggagtcttactctgt

SEQ ID NO: 163527 - DNA, 20 bp, Homo sapiens
  source 1..20: mol_type = genomic DNA
agacggagtcttactctgtg

SEQ ID NO: 163528 - DNA, 20 bp, Homo sapiens
  source 1..20: mol_type = genomic DNA
gacggagtcttactctgtgg

SEQ ID NO: 163529 - DNA, 20 bp, Homo sapiens
  source 1..20: mol_type = genomic DNA
acggagtcttactctgtggc

SEQ ID NO: 163530 - DNA, 20 bp, Homo sapiens
  source 1..20: mol_type = genomic DNA
cggagtcttactctgtggcc

SEQ ID NO: 163531 - DNA, 20 bp, Homo sapiens
  source 1..20: mol_type = genomic DNA
ggagtcttactctgtggccc

SEQ ID NO: 163532 - DNA, 20 bp, Homo sapiens
  source 1..20: mol_type = genomic DNA
gagtcttactctgtggccca

SEQ ID NO: 163533 - DNA, 20 bp, Homo sapiens
  source 1..20: mol_type = genomic DNA
agtcttactctgtggcccag

SEQ ID NO: 163534 - DNA, 20 bp, Homo sapiens
  source 1..20: mol_type = genomic DNA
gtcttactctgtggcccagg

SEQ ID NO: 163535 - DNA, 20 bp, Homo sapiens
  source 1..20: mol_type = genomic DNA
tcttactctgtggcccaggc

SEQ ID NO: 163536 - DNA, 20 bp, Homo sapiens
  source 1..20: mol_type = genomic DNA
cttactctgtggcccaggct

SEQ ID NO: 163537 - DNA, 20 bp, Homo sapiens
  source 1..20: mol_type = genomic DNA
ttactctgtggcccaggctg

SEQ ID NO: 163538 - DNA, 20 bp, Homo sapiens
  source 1..20: mol_type = genomic DNA
tactctgtggcccaggctgg

SEQ ID NO: 163539 - DNA, 20 bp, Homo sapiens
  source 1..20: mol_type = genomic DNA
actctgtggcccaggctgga

SEQ ID NO: 163540 - DNA, 20 bp, Homo sapiens
  source 1..20: mol_type = genomic DNA
ctctgtggcccaggctggag

SEQ ID NO: 163541 - DNA, 20 bp, Homo sapiens
  source 1..20: mol_type = genomic DNA
tctgtggcccaggctggagt

SEQ ID NO: 163542 - DNA, 20 bp, Homo sapiens
  source 1..20: mol_type = genomic DNA
ctgtggcccaggctggagtg

SEQ ID NO: 163543 - DNA, 20 bp, Homo sapiens
  source 1..20: mol_type = genomic DNA
tgtggcccaggctggagtgc

SEQ ID NO: 163544 - DNA, 20 bp, Homo sapiens
  source 1..20: mol_type = genomic DNA
gtggcccaggctggagtgca

SEQ ID NO: 163545 - DNA, 20 bp, Homo sapiens
  source 1..20: mol_type = genomic DNA
tggcccaggctggagtgcag

SEQ ID NO: 163546 - DNA, 20 bp, Homo sapiens
  source 1..20: mol_type = genomic DNA
ggcccaggctggagtgcagt

SEQ ID NO: 163547 - DNA, 20 bp, Homo sapiens
  source 1..20: mol_type = genomic DNA
gcccaggctggagtgcagtg

SEQ ID NO: 163548 - DNA, 20 bp, Homo sapiens
  source 1..20: mol_type = genomic DNA
cccaggctggagtgcagtgg

SEQ ID NO: 163549 - DNA, 20 bp, Homo sapiens
  source 1..20: mol_type = genomic DNA
ccaggctggagtgcagtggc

SEQ ID NO: 163550 - DNA, 20 bp, Homo sapiens
  source 1..20: mol_type = genomic DNA
caggctggagtgcagtggcg

SEQ ID NO: 163551 - DNA, 20 bp, Homo sapiens
  source 1..20: mol_type = genomic DNA
aggctggagtgcagtggcgc

SEQ ID NO: 163552 - DNA, 20 bp, Homo sapiens
  source 1..20: mol_type = genomic DNA
ggctggagtgcagtggcgcg

SEQ ID NO: 163553 - DNA, 20 bp, Homo sapiens
  source 1..20: mol_type = genomic DNA
gctggagtgcagtggcgcga

SEQ ID NO: 163554 - DNA, 20 bp, Homo sapiens
  source 1..20: mol_type = genomic DNA
ctggagtgcagtggcgcgat

SEQ ID NO: 163555 - DNA, 20 bp, Homo sapiens
  source 1..20: mol_type = genomic DNA
tggagtgcagtggcgcgatc

SEQ ID NO: 163556 - DNA, 20 bp, Homo sapiens
  source 1..20: mol_type = genomic DNA
ggagtgcagtggcgcgatct

SEQ ID NO: 163557 - DNA, 20 bp, Homo sapiens
  source 1..20: mol_type = genomic DNA
gagtgcagtggcgcgatctc

SEQ ID NO: 163558 - DNA, 20 bp, Homo sapiens
  source 1..20: mol_type = genomic DNA
agtgcagtggcgcgatctcg

SEQ ID NO: 163559 - DNA, 20 bp, Homo sapiens
  source 1..20: mol_type = genomic DNA
gtgcagtggcgcgatctcgg

SEQ ID NO: 163560 - DNA, 20 bp, Homo sapiens
  source 1..20: mol_type = genomic DNA
tgcagtggcgcgatctcggc

SEQ ID NO: 163561 - DNA, 20 bp, Homo sapiens
  source 1..20: mol_type = genomic DNA
gcagtggcgcgatctcggct

SEQ ID NO: 163562 - DNA, 20 bp, Homo sapiens
  source 1..20: mol_type = genomic DNA
cagtggcgcgatctcggctc

SEQ ID NO: 163563 - DNA, 20 bp, Homo sapiens
  source 1..20: mol_type = genomic DNA
agtggcgcgatctcggctca

SEQ ID NO: 163564 - DNA, 20 bp, Homo sapiens
  source 1..20: mol_type = genomic DNA
gtggcgcgatctcggctcac

SEQ ID NO: 163565 - DNA, 20 bp, Homo sapiens
  source 1..20: mol_type = genomic DNA
tggcgcgatctcggctcact

SEQ ID NO: 163566 - DNA, 20 bp, Homo sapiens
  source 1..20: mol_type = genomic DNA
ggcgcgatctcggctcactg

SEQ ID NO: 163567 - DNA, 20 bp, Homo sapiens
  source 1..20: mol_type = genomic DNA
gcgcgatctcggctcactgc

SEQ ID NO: 163568 - DNA, 20 bp, Homo sapiens
  source 1..20: mol_type = genomic DNA
cgcgatctcggctcactgca

SEQ ID NO: 163569 - DNA, 20 bp, Homo sapiens
  source 1..20: mol_type = genomic DNA
gcgatctcggctcactgcaa

SEQ ID NO: 163570 - DNA, 20 bp, Homo sapiens
  source 1..20: mol_type = genomic DNA
cgatctcggctcactgcaag

SEQ ID NO: 163571 - DNA, 20 bp, Homo sapiens
  source 1..20: mol_type = genomic DNA
gatctcggctcactgcaagc

SEQ ID NO: 163572 - DNA, 20 bp, Homo sapiens
  source 1..20: mol_type = genomic DNA
atctcggctcactgcaagct

SEQ ID NO: 163573 - DNA, 20 bp, Homo sapiens
  source 1..20: mol_type = genomic DNA
tctcggctcactgcaagctc

SEQ ID NO: 163574 - DNA, 20 bp, Homo sapiens
  source 1..20: mol_type = genomic DNA
ctcggctcactgcaagctcc

SEQ ID NO: 163575 - DNA, 20 bp, Homo sapiens
  source 1..20: mol_type = genomic DNA
tcggctcactgcaagctccg

SEQ ID NO: 163576 - DNA, 20 bp, Homo sapiens
  source 1..20: mol_type = genomic DNA
cggctcactgcaagctccgc

SEQ ID NO: 163577 - DNA, 20 bp, Homo sapiens
  source 1..20: mol_type = genomic DNA
ggctcactgcaagctccgcc

SEQ ID NO: 163578 - DNA, 20 bp, Homo sapiens
  source 1..20: mol_type = genomic DNA
gctcactgcaagctccgcct

SEQ ID NO: 163579 - DNA, 20 bp, Homo sapiens
  source 1..20: mol_type = genomic DNA
ctcactgcaagctccgcctc

SEQ ID NO: 163580 - DNA, 20 bp, Homo sapiens
  source 1..20: mol_type = genomic DNA
tcactgcaagctccgcctcc

SEQ ID NO: 163581 - DNA, 20 bp, Homo sapiens
  source 1..20: mol_type = genomic DNA
cactgcaagctccgcctccc

SEQ ID NO: 163582 - DNA, 20 bp, Homo sapiens
  source 1..20: mol_type = genomic DNA
actgcaagctccgcctcccg

SEQ ID NO: 163583 - DNA, 20 bp, Homo sapiens
  source 1..20: mol_type = genomic DNA
ctgcaagctccgcctcccgg

SEQ ID NO: 163584 - DNA, 20 bp, Homo sapiens
  source 1..20: mol_type = genomic DNA
tgcaagctccgcctcccggg

SEQ ID NO: 163585 - DNA, 20 bp, Homo sapiens
  source 1..20: mol_type = genomic DNA
gcaagctccgcctcccgggt

SEQ ID NO: 163586 - DNA, 20 bp, Homo sapiens
  source 1..20: mol_type = genomic DNA
caagctccgcctcccgggtt

SEQ ID NO: 163587 - DNA, 20 bp, Homo sapiens
  source 1..20: mol_type = genomic DNA
aagctccgcctcccgggttc

SEQ ID NO: 163588 - DNA, 20 bp, Homo sapiens
  source 1..20: mol_type = genomic DNA
agctccgcctcccgggttca

SEQ ID NO: 163589 - DNA, 20 bp, Homo sapiens
  source 1..20: mol_type = genomic DNA
gctccgcctcccgggttcat

SEQ ID NO: 163590 - DNA, 20 bp, Homo sapiens
  source 1..20: mol_type = genomic DNA
ctccgcctcccgggttcatg

SEQ ID NO: 163591 - DNA, 20 bp, Homo sapiens
  source 1..20: mol_type = genomic DNA
tccgcctcccgggttcatgc

SEQ ID NO: 163592 - DNA, 20 bp, Homo sapiens
  source 1..20: mol_type = genomic DNA
ccgcctcccgggttcatgcc

SEQ ID NO: 163593 - DNA, 20 bp, Homo sapiens
  source 1..20: mol_type = genomic DNA
cgcctcccgggttcatgcca

SEQ ID NO: 163594 - DNA, 20 bp, Homo sapiens
  source 1..20: mol_type = genomic DNA
gcctcccgggttcatgccat

SEQ ID NO: 163595 - DNA, 20 bp, Homo sapiens
  source 1..20: mol_type = genomic DNA
cctcccgggttcatgccatt

SEQ ID NO: 163596 - DNA, 20 bp, Homo sapiens
  source 1..20: mol_type = genomic DNA
ctcccgggttcatgccattc

SEQ ID NO: 163597 - DNA, 20 bp, Homo sapiens
  source 1..20: mol_type = genomic DNA
tcccgggttcatgccattct

SEQ ID NO: 163598 - DNA, 20 bp, Homo sapiens
  source 1..20: mol_type = genomic DNA
cccgggttcatgccattctc

SEQ ID NO: 163599 - DNA, 20 bp, Homo sapiens
  source 1..20: mol_type = genomic DNA
ccgggttcatgccattctcc

SEQ ID NO: 163600 - DNA, 20 bp, Homo sapiens
  source 1..20: mol_type = genomic DNA
cgggttcatgccattctcct

SEQ ID NO: 163601 - DNA, 20 bp, Homo sapiens
  source 1..20: mol_type = genomic DNA
gggttcatgccattctcctg

SEQ ID NO: 163602 - DNA, 20 bp, Homo sapiens
  source 1..20: mol_type = genomic DNA
ggttcatgccattctcctgc

SEQ ID NO: 163603 - DNA, 20 bp, Homo sapiens
  source 1..20: mol_type = genomic DNA
gttcatgccattctcctgcc

SEQ ID NO: 163604 - DNA, 20 bp, Homo sapiens
  source 1..20: mol_type = genomic DNA
ttcatgccattctcctgcct

SEQ ID NO: 163605 - DNA, 20 bp, Homo sapiens
  source 1..20: mol_type = genomic DNA
tcatgccattctcctgcctc

SEQ ID NO: 163606 - DNA, 20 bp, Homo sapiens
  source 1..20: mol_type = genomic DNA
catgccattctcctgcctca

SEQ ID NO: 163607 - DNA, 20 bp, Homo sapiens
  source 1..20: mol_type = genomic DNA
atgccattctcctgcctcag

SEQ ID NO: 163608 - DNA, 20 bp, Homo sapiens
  source 1..20: mol_type = genomic DNA
tgccattctcctgcctcagc

SEQ ID NO: 163609 - DNA, 20 bp, Homo sapiens
  source 1..20: mol_type = genomic DNA
gccattctcctgcctcagcc

SEQ ID NO: 163610 - DNA, 20 bp, Homo sapiens
  source 1..20: mol_type = genomic DNA
ccattctcctgcctcagccc

SEQ ID NO: 163611 - DNA, 20 bp, Homo sapiens
  source 1..20: mol_type = genomic DNA
cattctcctgcctcagcccc

SEQ ID NO: 163612 - DNA, 20 bp, Homo sapiens
  source 1..20: mol_type = genomic DNA
attctcctgcctcagccccc

SEQ ID NO: 163613 - DNA, 20 bp, Homo sapiens
  source 1..20: mol_type = genomic DNA
ttctcctgcctcagccccct

SEQ ID NO: 163614 - DNA, 20 bp, Homo sapiens
  source 1..20: mol_type = genomic DNA
tctcctgcctcagccccctg

SEQ ID NO: 163615 - DNA, 20 bp, Homo sapiens
  source 1..20: mol_type = genomic DNA
ctcctgcctcagccccctga

SEQ ID NO: 163616 - DNA, 20 bp, Homo sapiens
  source 1..20: mol_type = genomic DNA
tcctgcctcagccccctgag

SEQ ID NO: 163617 - DNA, 20 bp, Homo sapiens
  source 1..20: mol_type = genomic DNA
cctgcctcagccccctgagt

SEQ ID NO: 163618 - DNA, 20 bp, Homo sapiens
  source 1..20: mol_type = genomic DNA
ctgcctcagccccctgagta

SEQ ID NO: 163619 - DNA, 20 bp, Homo sapiens
  source 1..20: mol_type = genomic DNA
tgcctcagccccctgagtag

SEQ ID NO: 163620 - DNA, 20 bp, Homo sapiens
  source 1..20: mol_type = genomic DNA
gcctcagccccctgagtagc

SEQ ID NO: 163621 - DNA, 20 bp, Homo sapiens
  source 1..20: mol_type = genomic DNA
cctcagccccctgagtagct

SEQ ID NO: 163622 - DNA, 20 bp, Homo sapiens
  source 1..20: mol_type = genomic DNA
ctcagccccctgagtagctg

SEQ ID NO: 163623 - DNA, 20 bp, Homo sapiens
  source 1..20: mol_type = genomic DNA
tcagccccctgagtagctgg

SEQ ID NO: 163624 - DNA, 20 bp, Homo sapiens
  source 1..20: mol_type = genomic DNA
cagccccctgagtagctggg

SEQ ID NO: 163625 - DNA, 20 bp, Homo sapiens
  source 1..20: mol_type = genomic DNA
agccccctgagtagctggga

SEQ ID NO: 163626 - DNA, 20 bp, Homo sapiens
  source 1..20: mol_type = genomic DNA
gccccctgagtagctgggac

SEQ ID NO: 163627 - DNA, 20 bp, Homo sapiens
  source 1..20: mol_type = genomic DNA
ccccctgagtagctgggact

SEQ ID NO: 163628 - DNA, 20 bp, Homo sapiens
  source 1..20: mol_type = genomic DNA
cccctgagtagctgggacta

SEQ ID NO: 163629 - DNA, 20 bp, Homo sapiens
  source 1..20: mol_type = genomic DNA
ccctgagtagctgggactac

SEQ ID NO: 163630 - DNA, 20 bp, Homo sapiens
  source 1..20: mol_type = genomic DNA
cctgagtagctgggactaca

SEQ ID NO: 163631 - DNA, 20 bp, Homo sapiens
  source 1..20: mol_type = genomic DNA
ctgagtagctgggactacag

SEQ ID NO: 163632 - DNA, 20 bp, Homo sapiens
  source 1..20: mol_type = genomic DNA
tgagtagctgggactacagg

SEQ ID NO: 163633 - DNA, 20 bp, Homo sapiens
  source 1..20: mol_type = genomic DNA
gagtagctgggactacaggt

SEQ ID NO: 163634 - DNA, 20 bp, Homo sapiens
  source 1..20: mol_type = genomic DNA
agtagctgggactacaggtg

SEQ ID NO: 163635 - DNA, 20 bp, Homo sapiens
  source 1..20: mol_type = genomic DNA
gtagctgggactacaggtgc

SEQ ID NO: 163636 - DNA, 20 bp, Homo sapiens
  source 1..20: mol_type = genomic DNA
tagctgggactacaggtgcc

SEQ ID NO: 163637 - DNA, 20 bp, Homo sapiens
  source 1..20: mol_type = genomic DNA
agctgggactacaggtgccc

SEQ ID NO: 163638 - DNA, 20 bp, Homo sapiens
  source 1..20: mol_type = genomic DNA
gctgggactacaggtgcccg

SEQ ID NO: 163639 - DNA, 20 bp, Homo sapiens
  source 1..20: mol_type = genomic DNA
ctgggactacaggtgcccgc

SEQ ID NO: 163640 - DNA, 20 bp, Homo sapiens
  source 1..20: mol_type = genomic DNA
tgggactacaggtgcccgcc

SEQ ID NO: 163641 - DNA, 20 bp, Homo sapiens
  source 1..20: mol_type = genomic DNA
gggactacaggtgcccgcca

SEQ ID NO: 163642 - DNA, 20 bp, Homo sapiens
  source 1..20: mol_type = genomic DNA
ggactacaggtgcccgccac

SEQ ID NO: 163643 - DNA, 20 bp, Homo sapiens
  source 1..20: mol_type = genomic DNA
gactacaggtgcccgccacc

SEQ ID NO: 163644 - DNA, 20 bp, Homo sapiens
  source 1..20: mol_type = genomic DNA
actacaggtgcccgccaccc

SEQ ID NO: 163645 - DNA, 20 bp, Homo sapiens
  source 1..20: mol_type = genomic DNA
ctacaggtgcccgccacccc

SEQ ID NO: 163646 - DNA, 20 bp, Homo sapiens
  source 1..20: mol_type = genomic DNA
tacaggtgcccgccaccccg

SEQ ID NO: 163647 - DNA, 20 bp, Homo sapiens
  source 1..20: mol_type = genomic DNA
acaggtgcccgccaccccgc

SEQ ID NO: 163648 - DNA, 20 bp, Homo sapiens
  source 1..20: mol_type = genomic DNA
caggtgcccgccaccccgcc

SEQ ID NO: 163649 - DNA, 20 bp, Homo sapiens
  source 1..20: mol_type = genomic DNA
aggtgcccgccaccccgcct

SEQ ID NO: 163650 - DNA, 20 bp, Homo sapiens
  source 1..20: mol_type = genomic DNA
ggtgcccgccaccccgcctg

SEQ ID NO: 163651 - DNA, 20 bp, Homo sapiens
  source 1..20: mol_type = genomic DNA
gtgcccgccaccccgcctgg

SEQ ID NO: 163652 - DNA, 20 bp, Homo sapiens
  source 1..20: mol_type = genomic DNA
tgcccgccaccccgcctggc

SEQ ID NO: 163653 - DNA, 20 bp, Homo sapiens
  source 1..20: mol_type = genomic DNA
gcccgccaccccgcctggct

SEQ ID NO: 163654 - DNA, 20 bp, Homo sapiens
  source 1..20: mol_type = genomic DNA
cccgccaccccgcctggcta

SEQ ID NO: 163655 - DNA, 20 bp, Homo sapiens
  source 1..20: mol_type = genomic DNA
ccgccaccccgcctggctaa

SEQ ID NO: 163656 - DNA, 20 bp, Homo sapiens
  source 1..20: mol_type = genomic DNA
cgccaccccgcctggctaat

SEQ ID NO: 163657 - DNA, 20 bp, Homo sapiens
  source 1..20: mol_type = genomic DNA
gccaccccgcctggctaatt

SEQ ID NO: 163658 - DNA, 20 bp, Homo sapiens
  source 1..20: mol_type = genomic DNA
ccaccccgcctggctaattt

SEQ ID NO: 163659 - DNA, 20 bp, Homo sapiens
  source 1..20: mol_type = genomic DNA
caccccgcctggctaatttt

SEQ ID NO: 163660 - DNA, 20 bp, Homo sapiens
  source 1..20: mol_type = genomic DNA
accccgcctggctaattttt

SEQ ID NO: 163661 - DNA, 20 bp, Homo sapiens
  source 1..20: mol_type = genomic DNA
ccccgcctggctaatttttt

SEQ ID NO: 163662 - DNA, 20 bp, Homo sapiens
  source 1..20: mol_type = genomic DNA
cccgcctggctaattttttg

SEQ ID NO: 163663 - DNA, 20 bp, Homo sapiens
  source 1..20: mol_type = genomic DNA
ccgcctggctaattttttgt

SEQ ID NO: 163664 - DNA, 20 bp, Homo sapiens
  source 1..20: mol_type = genomic DNA
cgcctggctaattttttgta

SEQ ID NO: 163665 - DNA, 20 bp, Homo sapiens
  source 1..20: mol_type = genomic DNA
gcctggctaattttttgtat

SEQ ID NO: 163666 - DNA, 20 bp, Homo sapiens
  source 1..20: mol_type = genomic DNA
cctggctaattttttgtatt

SEQ ID NO: 163667 - DNA, 20 bp, Homo sapiens
  source 1..20: mol_type = genomic DNA
ctggctaattttttgtattt

SEQ ID NO: 163668 - DNA, 20 bp, Homo sapiens
  source 1..20: mol_type = genomic DNA
tggctaattttttgtatttt

SEQ ID NO: 163669 - DNA, 20 bp, Homo sapiens
  source 1..20: mol_type = genomic DNA
ggctaattttttgtattttt

SEQ ID NO: 163670 - DNA, 20 bp, Homo sapiens
  source 1..20: mol_type = genomic DNA
gctaattttttgtattttta

SEQ ID NO: 163671 - DNA, 20 bp, Homo sapiens
  source 1..20: mol_type = genomic DNA
ctaattttttgtatttttag

SEQ ID NO: 163672 - DNA, 20 bp, Homo sapiens
  source 1..20: mol_type = genomic DNA
taattttttgtatttttagt

SEQ ID NO: 163673 - DNA, 20 bp, Homo sapiens
  source 1..20: mol_type = genomic DNA
aattttttgtatttttagta

SEQ ID NO: 163674 - DNA, 20 bp, Homo sapiens
  source 1..20: mol_type = genomic DNA
attttttgtatttttagtag

SEQ ID NO: 163675 - DNA, 20 bp, Homo sapiens
  source 1..20: mol_type = genomic DNA
ttttttgtatttttagtaga

SEQ ID NO: 163676 - DNA, 20 bp, Homo sapiens
  source 1..20: mol_type = genomic DNA
tttttgtatttttagtagag

SEQ ID NO: 163677 - DNA, 20 bp, Homo sapiens
  source 1..20: mol_type = genomic DNA
ttttgtatttttagtagaga

SEQ ID NO: 163678 - DNA, 20 bp, Homo sapiens
  source 1..20: mol_type = genomic DNA
tttgtatttttagtagagac

SEQ ID NO: 163679 - DNA, 20 bp, Homo sapiens
  source 1..20: mol_type = genomic DNA
ttgtatttttagtagagacg

SEQ ID NO: 163680 - DNA, 20 bp, Homo sapiens
  source 1..20: mol_type = genomic DNA
tgtatttttagtagagacgg

SEQ ID NO: 163681 - DNA, 20 bp, Homo sapiens
  source 1..20: mol_type = genomic DNA
gtatttttagtagagacggg

SEQ ID NO: 163682 - DNA, 20 bp, Homo sapiens
  source 1..20: mol_type = genomic DNA
tatttttagtagagacgggg

SEQ ID NO: 163683 - DNA, 20 bp, Homo sapiens
  source 1..20: mol_type = genomic DNA
atttttagtagagacggggt

SEQ ID NO: 163684 - DNA, 20 bp, Homo sapiens
  source 1..20: mol_type = genomic DNA
tttttagtagagacggggtt

SEQ ID NO: 163685 - DNA, 20 bp, Homo sapiens
  source 1..20: mol_type = genomic DNA
ttttagtagagacggggttt

SEQ ID NO: 163686 - DNA, 20 bp, Homo sapiens
  source 1..20: mol_type = genomic DNA
tttagtagagacggggtttc

SEQ ID NO: 163687 - DNA, 20 bp, Homo sapiens
  source 1..20: mol_type = genomic DNA
ttagtagagacggggtttca

SEQ ID NO: 163688 - DNA, 20 bp, Homo sapiens
  source 1..20: mol_type = genomic DNA
tagtagagacggggtttcac

SEQ ID NO: 163689 - DNA, 20 bp, Homo sapiens
  source 1..20: mol_type = genomic DNA
agtagagacggggtttcact

SEQ ID NO: 163690 - DNA, 20 bp, Homo sapiens
  source 1..20: mol_type = genomic DNA
gtagagacggggtttcactg

SEQ ID NO: 163691 - DNA, 20 bp, Homo sapiens
  source 1..20: mol_type = genomic DNA
tagagacggggtttcactgt

SEQ ID NO: 163692 - DNA, 20 bp, Homo sapiens
  source 1..20: mol_type = genomic DNA
agagacggggtttcactgtg

SEQ ID NO: 163693 - DNA, 20 bp, Homo sapiens
  source 1..20: mol_type = genomic DNA
gagacggggtttcactgtgt

SEQ ID NO: 163694 - DNA, 20 bp, Homo sapiens
  source 1..20: mol_type = genomic DNA
agacggggtttcactgtgtt

SEQ ID NO: 163695 - DNA, 20 bp, Homo sapiens
  source 1..20: mol_type = genomic DNA
gacggggtttcactgtgtta

SEQ ID NO: 163696 - DNA, 20 bp, Homo sapiens
  source 1..20: mol_type = genomic DNA
acggggtttcactgtgttag

SEQ ID NO: 163697 - DNA, 20 bp, Homo sapiens
  source 1..20: mol_type = genomic DNA
cggggtttcactgtgttagc

SEQ ID NO: 163698 - DNA, 20 bp, Homo sapiens
  source 1..20: mol_type = genomic DNA
ggggtttcactgtgttagcc

SEQ ID NO: 163699 - DNA, 20 bp, Homo sapiens
  source 1..20: mol_type = genomic DNA
gggtttcactgtgttagcca

SEQ ID NO: 163700 - DNA, 20 bp, Homo sapiens
  source 1..20: mol_type = genomic DNA
ggtttcactgtgttagccaa

SEQ ID NO: 163701 - DNA, 20 bp, Homo sapiens
  source 1..20: mol_type = genomic DNA
gtttcactgtgttagccaag

SEQ ID NO: 163702 - DNA, 20 bp, Homo sapiens
  source 1..20: mol_type = genomic DNA
tttcactgtgttagccaaga

SEQ ID NO: 163703 - DNA, 20 bp, Homo sapiens
  source 1..20: mol_type = genomic DNA
ttcactgtgttagccaagat

SEQ ID NO: 163704 - DNA, 20 bp, Homo sapiens
  source 1..20: mol_type = genomic DNA
tcactgtgttagccaagatg

SEQ ID NO: 163705 - DNA, 20 bp, Homo sapiens
  source 1..20: mol_type = genomic DNA
cactgtgttagccaagatgg

SEQ ID NO: 163706 - DNA, 20 bp, Homo sapiens
  source 1..20: mol_type = genomic DNA
actgtgttagccaagatggt

SEQ ID NO: 163707 - DNA, 20 bp, Homo sapiens
  source 1..20: mol_type = genomic DNA
ctgtgttagccaagatggtc

SEQ ID NO: 163708 - DNA, 20 bp, Homo sapiens
  source 1..20: mol_type = genomic DNA
tgtgttagccaagatggtct

SEQ ID NO: 163709 - DNA, 20 bp, Homo sapiens
  source 1..20: mol_type = genomic DNA
gtgttagccaagatggtctc

SEQ ID NO: 163710 - DNA, 20 bp, Homo sapiens
  source 1..20: mol_type = genomic DNA
tgttagccaagatggtctct

SEQ ID NO: 163711 - DNA, 20 bp, Homo sapiens
  source 1..20: mol_type = genomic DNA
gttagccaagatggtctctc

SEQ ID NO: 163712 - DNA, 20 bp, Homo sapiens
  source 1..20: mol_type = genomic DNA
ttagccaagatggtctctct

SEQ ID NO: 163713 - DNA, 20 bp, Homo sapiens
  source 1..20: mol_type = genomic DNA
tagccaagatggtctctctc

SEQ ID NO: 163714 - DNA, 20 bp, Homo sapiens
  source 1..20: mol_type = genomic DNA
agccaagatggtctctctcc

SEQ ID NO: 163715 - DNA, 20 bp, Homo sapiens
  source 1..20: mol_type = genomic DNA
gccaagatggtctctctcct

SEQ ID NO: 163716 - DNA, 20 bp, Homo sapiens
  source 1..20: mol_type = genomic DNA
ccaagatggtctctctcctg

SEQ ID NO: 163717 - DNA, 20 bp, Homo sapiens
  source 1..20: mol_type = genomic DNA
caagatggtctctctcctga

SEQ ID NO: 163718 - DNA, 20 bp, Homo sapiens
  source 1..20: mol_type = genomic DNA
aagatggtctctctcctgac

SEQ ID NO: 163719 - DNA, 20 bp, Homo sapiens
  source 1..20: mol_type = genomic DNA
agatggtctctctcctgacc

SEQ ID NO: 163720 - DNA, 20 bp, Homo sapiens
  source 1..20: mol_type = genomic DNA
gatggtctctctcctgacct

SEQ ID NO: 163721 - DNA, 20 bp, Homo sapiens
  source 1..20: mol_type = genomic DNA
atggtctctctcctgacctc

SEQ ID NO: 163722 - DNA, 20 bp, Homo sapiens
  source 1..20: mol_type = genomic DNA
tggtctctctcctgacctcg

SEQ ID NO: 163723 - DNA, 20 bp, Homo sapiens
  source 1..20: mol_type = genomic DNA
ggtctctctcctgacctcgt

SEQ ID NO: 163724 - DNA, 20 bp, Homo sapiens
  source 1..20: mol_type = genomic DNA
gtctctctcctgacctcgtg

SEQ ID NO: 163725 - DNA, 20 bp, Homo sapiens
  source 1..20: mol_type = genomic DNA
tctctctcctgacctcgtga

SEQ ID NO: 163726 - DNA, 20 bp, Homo sapiens
  source 1..20: mol_type = genomic DNA
ctctctcctgacctcgtgat

SEQ ID NO: 163727 - DNA, 20 bp, Homo sapiens
  source 1..20: mol_type = genomic DNA
tctctcctgacctcgtgatc

SEQ ID NO: 163728 - DNA, 20 bp, Homo sapiens
  source 1..20: mol_type = genomic DNA
ctctcctgacctcgtgatcc

SEQ ID NO: 163729 - DNA, 20 bp, Homo sapiens
  source 1..20: mol_type = genomic DNA
tctcctgacctcgtgatccg

SEQ ID NO: 163730 - DNA, 20 bp, Homo sapiens
  source 1..20: mol_type = genomic DNA
ctcctgacctcgtgatccgc

SEQ ID NO: 163731 - DNA, 20 bp, Homo sapiens
  source 1..20: mol_type = genomic DNA
tcctgacctcgtgatccgcc

SEQ ID NO: 163732 - DNA, 20 bp, Homo sapiens
  source 1..20: mol_type = genomic DNA
cctgacctcgtgatccgcct

SEQ ID NO: 163733 - DNA, 20 bp, Homo sapiens
  source 1..20: mol_type = genomic DNA
ctgacctcgtgatccgcctg

SEQ ID NO: 163734 - DNA, 20 bp, Homo sapiens
  source 1..20: mol_type = genomic DNA
tgacctcgtgatccgcctgt

SEQ ID NO: 163735 - DNA, 20 bp, Homo sapiens
  source 1..20: mol_type = genomic DNA
gacctcgtgatccgcctgtc

SEQ ID NO: 163736 - DNA, 20 bp, Homo sapiens
  source 1..20: mol_type = genomic DNA
acctcgtgatccgcctgtct

SEQ ID NO: 163737 - DNA, 20 bp, Homo sapiens
  source 1..20: mol_type = genomic DNA
cctcgtgatccgcctgtctc

SEQ ID NO: 163738 - DNA, 20 bp, Homo sapiens
  source 1..20: mol_type = genomic DNA
ctcgtgatccgcctgtctca

SEQ ID NO: 163739 - DNA, 20 bp, Homo sapiens
  source 1..20: mol_type = genomic DNA
tcgtgatccgcctgtctcag

SEQ ID NO: 163740 - DNA, 20 bp, Homo sapiens
  source 1..20: mol_type = genomic DNA
cgtgatccgcctgtctcagc

SEQ ID NO: 163741 - DNA, 20 bp, Homo sapiens
  source 1..20: mol_type = genomic DNA
gtgatccgcctgtctcagcc

SEQ ID NO: 163742 - DNA, 20 bp, Homo sapiens
  source 1..20: mol_type = genomic DNA
tgatccgcctgtctcagcct

SEQ ID NO: 163743 - DNA, 20 bp, Homo sapiens
  source 1..20: mol_type = genomic DNA
gatccgcctgtctcagcctc

SEQ ID NO: 163744 - DNA, 20 bp, Homo sapiens
  source 1..20: mol_type = genomic DNA
atccgcctgtctcagcctcc

SEQ ID NO: 163745 - DNA, 20 bp, Homo sapiens
  source 1..20: mol_type = genomic DNA
tccgcctgtctcagcctccc

SEQ ID NO: 163746 - DNA, 20 bp, Homo sapiens
  source 1..20: mol_type = genomic DNA
ccgcctgtctcagcctccca

SEQ ID NO: 163747 - DNA, 20 bp, Homo sapiens
  source 1..20: mol_type = genomic DNA
cgcctgtctcagcctcccaa

SEQ ID NO: 163748 - DNA, 20 bp, Homo sapiens
  source 1..20: mol_type = genomic DNA
gcctgtctcagcctcccaaa

SEQ ID NO: 163749 - DNA, 20 bp, Homo sapiens
  source 1..20: mol_type = genomic DNA
cctgtctcagcctcccaaag

SEQ ID NO: 163750 - DNA, 20 bp, Homo sapiens
  source 1..20: mol_type = genomic DNA
ctgtctcagcctcccaaagt

SEQ ID NO: 163751 - DNA, 20 bp, Homo sapiens
  source 1..20: mol_type = genomic DNA
tgtctcagcctcccaaagtg

SEQ ID NO: 163752 - DNA, 20 bp, Homo sapiens
  source 1..20: mol_type = genomic DNA
gtctcagcctcccaaagtgc

SEQ ID NO: 163753 - DNA, 20 bp, Homo sapiens
  source 1..20: mol_type = genomic DNA
tctcagcctcccaaagtgct

SEQ ID NO: 163754 - DNA, 20 bp, Homo sapiens
  source 1..20: mol_type = genomic DNA
ctcagcctcccaaagtgctg

SEQ ID NO: 163755 - DNA, 20 bp, Homo sapiens
  source 1..20: mol_type = genomic DNA
tcagcctcccaaagtgctgg

SEQ ID NO: 163756 - DNA, 20 bp, Homo sapiens
  source 1..20: mol_type = genomic DNA
cagcctcccaaagtgctggg

SEQ ID NO: 163757 - DNA, 20 bp, Homo sapiens
  source 1..20: mol_type = genomic DNA
agcctcccaaagtgctggga

SEQ ID NO: 163758 - DNA, 20 bp, Homo sapiens
  source 1..20: mol_type = genomic DNA
gcctcccaaagtgctgggat

SEQ ID NO: 163759 - DNA, 20 bp, Homo sapiens
  source 1..20: mol_type = genomic DNA
cctcccaaagtgctgggatt

SEQ ID NO: 163760 - DNA, 20 bp, Homo sapiens
  source 1..20: mol_type = genomic DNA
ctcccaaagtgctgggatta

SEQ ID NO: 163761 - DNA, 20 bp, Homo sapiens
  source 1..20: mol_type = genomic DNA
tcccaaagtgctgggattac

SEQ ID NO: 163762 - DNA, 20 bp, Homo sapiens
  source 1..20: mol_type = genomic DNA
cccaaagtgctgggattaca

SEQ ID NO: 163763 - DNA, 20 bp, Homo sapiens
  source 1..20: mol_type = genomic DNA
ccaaagtgctgggattacag

SEQ ID NO: 163764 - DNA, 20 bp, Homo sapiens
  source 1..20: mol_type = genomic DNA
caaagtgctgggattacagg

SEQ ID NO: 163765 - DNA, 20 bp, Homo sapiens
  source 1..20: mol_type = genomic DNA
aaagtgctgggattacaggc

SEQ ID NO: 163766 - DNA, 20 bp, Homo sapiens
  source 1..20: mol_type = genomic DNA
aagtgctgggattacaggca

SEQ ID NO: 163767 - DNA, 20 bp, Homo sapiens
  source 1..20: mol_type = genomic DNA
agtgctgggattacaggcat

SEQ ID NO: 163768 - DNA, 20 bp, Homo sapiens
  source 1..20: mol_type = genomic DNA
gtgctgggattacaggcatg

SEQ ID NO: 163769 - DNA, 20 bp, Homo sapiens
  source 1..20: mol_type = genomic DNA
tgctgggattacaggcatga

SEQ ID NO: 163770 - DNA, 20 bp, Homo sapiens
  source 1..20: mol_type = genomic DNA
gctgggattacaggcatgag

SEQ ID NO: 163771 - DNA, 20 bp, Homo sapiens
  source 1..20: mol_type = genomic DNA
ctgggattacaggcatgagc

SEQ ID NO: 163772 - DNA, 20 bp, Homo sapiens
  source 1..20: mol_type = genomic DNA
tgggattacaggcatgagcc

SEQ ID NO: 163773 - DNA, 20 bp, Homo sapiens
  source 1..20: mol_type = genomic DNA
gggattacaggcatgagcca

SEQ ID NO: 163774 - DNA, 20 bp, Homo sapiens
  source 1..20: mol_type = genomic DNA
ggattacaggcatgagccac

SEQ ID NO: 163775 - DNA, 20 bp, Homo sapiens
  source 1..20: mol_type = genomic DNA
gattacaggcatgagccacc

SEQ ID NO: 163776 - DNA, 20 bp, Homo sapiens
  source 1..20: mol_type = genomic DNA
attacaggcatgagccaccg

SEQ ID NO: 163777 - DNA, 20 bp, Homo sapiens
  source 1..20: mol_type = genomic DNA
ttacaggcatgagccaccgc

SEQ ID NO: 163778 - DNA, 20 bp, Homo sapiens
  source 1..20: mol_type = genomic DNA
tacaggcatgagccaccgca

SEQ ID NO: 163779 - DNA, 20 bp, Homo sapiens
  source 1..20: mol_type = genomic DNA
acaggcatgagccaccgcac

SEQ ID NO: 163780 - DNA, 20 bp, Homo sapiens
  source 1..20: mol_type = genomic DNA
caggcatgagccaccgcacc

SEQ ID NO: 163781 - DNA, 20 bp, Homo sapiens
  source 1..20: mol_type = genomic DNA
aggcatgagccaccgcaccc

SEQ ID NO: 163782 - DNA, 20 bp, Homo sapiens
  source 1..20: mol_type = genomic DNA
ggcatgagccaccgcaccca

SEQ ID NO: 163783 - DNA, 20 bp, Homo sapiens
  source 1..20: mol_type = genomic DNA
gcatgagccaccgcacccag

SEQ ID NO: 163784 - DNA, 20 bp, Homo sapiens
  source 1..20: mol_type = genomic DNA
catgagccaccgcacccagc

SEQ ID NO: 163785 - DNA, 20 bp, Homo sapiens
  source 1..20: mol_type = genomic DNA
atgagccaccgcacccagcc

SEQ ID NO: 163786 - DNA, 20 bp, Homo sapiens
  source 1..20: mol_type = genomic DNA
tgagccaccgcacccagcca

SEQ ID NO: 163787 - DNA, 20 bp, Homo sapiens
  source 1..20: mol_type = genomic DNA
gagccaccgcacccagccag

SEQ ID NO: 163788 - DNA, 20 bp, Homo sapiens
  source 1..20: mol_type = genomic DNA
agccaccgcacccagccaga

SEQ ID NO: 163789 - DNA, 20 bp, Homo sapiens
  source 1..20: mol_type = genomic DNA
gccaccgcacccagccagaa

SEQ ID NO: 163790 - DNA, 20 bp, Homo sapiens
  source 1..20: mol_type = genomic DNA
ccaccgcacccagccagaag

SEQ ID NO: 163791 - DNA, 20 bp, Homo sapiens
  source 1..20: mol_type = genomic DNA
caccgcacccagccagaaga

SEQ ID NO: 163792 - DNA, 20 bp, Homo sapiens
  source 1..20: mol_type = genomic DNA
accgcacccagccagaagag

SEQ ID NO: 163793 - DNA, 20 bp, Homo sapiens
  source 1..20: mol_type = genomic DNA
ccgcacccagccagaagagg

SEQ ID NO: 163794 - DNA, 20 bp, Homo sapiens
  source 1..20: mol_type = genomic DNA
cgcacccagccagaagaggg

SEQ ID NO: 163795 - DNA, 20 bp, Homo sapiens
  source 1..20: mol_type = genomic DNA
gcacccagccagaagagggt

SEQ ID NO: 163796 - DNA, 20 bp, Homo sapiens
  source 1..20: mol_type = genomic DNA
cacccagccagaagagggtg

SEQ ID NO: 163797 - DNA, 20 bp, Homo sapiens
  source 1..20: mol_type = genomic DNA
acccagccagaagagggtgt

SEQ ID NO: 163798 - DNA, 20 bp, Homo sapiens
  source 1..20: mol_type = genomic DNA
cccagccagaagagggtgtt

SEQ ID NO: 163799 - DNA, 20 bp, Homo sapiens
  source 1..20: mol_type = genomic DNA
ccagccagaagagggtgttt

SEQ ID NO: 163800 - DNA, 20 bp, Homo sapiens
  source 1..20: mol_type = genomic DNA
cagccagaagagggtgtttt

SEQ ID NO: 163801 - DNA, 20 bp, Homo sapiens
  source 1..20: mol_type = genomic DNA
agccagaagagggtgttttt

SEQ ID NO: 163802 - DNA, 20 bp, Homo sapiens
  source 1..20: mol_type = genomic DNA
gccagaagagggtgtttttt

SEQ ID NO: 163803 - DNA, 20 bp, Homo sapiens
  source 1..20: mol_type = genomic DNA
ccagaagagggtgtttttta

SEQ ID NO: 163804 - DNA, 20 bp, Homo sapiens
  source 1..20: mol_type = genomic DNA
cagaagagggtgttttttaa

SEQ ID NO: 163805 - DNA, 20 bp, Homo sapiens
  source 1..20: mol_type = genomic DNA
agaagagggtgttttttaaa

SEQ ID NO: 163806 - DNA, 20 bp, Homo sapiens
  source 1..20: mol_type = genomic DNA
gaagagggtgttttttaaag

SEQ ID NO: 163807 - DNA, 20 bp, Homo sapiens
  source 1..20: mol_type = genomic DNA
aagagggtgttttttaaaga

SEQ ID NO: 163808 - DNA, 20 bp, Homo sapiens
  source 1..20: mol_type = genomic DNA
agagggtgttttttaaagaa

SEQ ID NO: 163809 - DNA, 20 bp, Homo sapiens
  source 1..20: mol_type = genomic DNA
gagggtgttttttaaagaag

SEQ ID NO: 163810 - DNA, 20 bp, Homo sapiens
  source 1..20: mol_type = genomic DNA
agggtgttttttaaagaagg

SEQ ID NO: 163811 - DNA, 20 bp, Homo sapiens
  source 1..20: mol_type = genomic DNA
gggtgttttttaaagaaggc

SEQ ID NO: 163812 - DNA, 20 bp, Homo sapiens
  source 1..20: mol_type = genomic DNA
ggtgttttttaaagaaggca

SEQ ID NO: 163813 - DNA, 20 bp, Homo sapiens
  source 1..20: mol_type = genomic DNA
gtgttttttaaagaaggcaa

SEQ ID NO: 163814 - DNA, 20 bp, Homo sapiens
  source 1..20: mol_type = genomic DNA
tgttttttaaagaaggcaaa

SEQ ID NO: 163815 - DNA, 20 bp, Homo sapiens
  source 1..20: mol_type = genomic DNA
gttttttaaagaaggcaaat

SEQ ID NO: 163816 - DNA, 20 bp, Homo sapiens
  source 1..20: mol_type = genomic DNA
ttttttaaagaaggcaaata

SEQ ID NO: 163817 - DNA, 20 bp, Homo sapiens
  source 1..20: mol_type = genomic DNA
tttttaaagaaggcaaatag

SEQ ID NO: 163818 - DNA, 20 bp, Homo sapiens
  source 1..20: mol_type = genomic DNA
ttttaaagaaggcaaatagg

SEQ ID NO: 163819 - DNA, 20 bp, Homo sapiens
  source 1..20: mol_type = genomic DNA
tttaaagaaggcaaatagga

SEQ ID NO: 163820 - DNA, 20 bp, Homo sapiens
  source 1..20: mol_type = genomic DNA
ttaaagaaggcaaataggaa

SEQ ID NO: 163821 - DNA, 20 bp, Homo sapiens
  source 1..20: mol_type = genomic DNA
taaagaaggcaaataggaaa

SEQ ID NO: 163822 - DNA, 20 bp, Homo sapiens
  source 1..20: mol_type = genomic DNA
aaagaaggcaaataggaaat

SEQ ID NO: 163823 - DNA, 20 bp, Homo sapiens
  source 1..20: mol_type = genomic DNA
aagaaggcaaataggaaata

SEQ ID NO: 163824 - DNA, 20 bp, Homo sapiens
  source 1..20: mol_type = genomic DNA
agaaggcaaataggaaataa

SEQ ID NO: 163825 - DNA, 20 bp, Homo sapiens
  source 1..20: mol_type = genomic DNA
gaaggcaaataggaaataaa

SEQ ID NO: 163826 - DNA, 20 bp, Homo sapiens
  source 1..20: mol_type = genomic DNA
aaggcaaataggaaataaaa

SEQ ID NO: 163827 - DNA, 20 bp, Homo sapiens
  source 1..20: mol_type = genomic DNA
aggcaaataggaaataaaaa

SEQ ID NO: 163828 - DNA, 20 bp, Homo sapiens
  source 1..20: mol_type = genomic DNA
ggcaaataggaaataaaaac

SEQ ID NO: 163829 - DNA, 20 bp, Homo sapiens
  source 1..20: mol_type = genomic DNA
gcaaataggaaataaaaact

SEQ ID NO: 163830 - DNA, 20 bp, Homo sapiens
  source 1..20: mol_type = genomic DNA
caaataggaaataaaaactt

SEQ ID NO: 163831 - DNA, 20 bp, Homo sapiens
  source 1..20: mol_type = genomic DNA
aaataggaaataaaaacttg

SEQ ID NO: 163832 - DNA, 20 bp, Homo sapiens
  source 1..20: mol_type = genomic DNA
aataggaaataaaaacttgg

SEQ ID NO: 163833 - DNA, 20 bp, Homo sapiens
  source 1..20: mol_type = genomic DNA
ataggaaataaaaacttggg

SEQ ID NO: 163834 - DNA, 20 bp, Homo sapiens
  source 1..20: mol_type = genomic DNA
taggaaataaaaacttgggc

SEQ ID NO: 163835 - DNA, 20 bp, Homo sapiens
  source 1..20: mol_type = genomic DNA
aggaaataaaaacttgggct

SEQ ID NO: 163836 - DNA, 20 bp, Homo sapiens
  source 1..20: mol_type = genomic DNA
ggaaataaaaacttgggctc

SEQ ID NO: 163837 - DNA, 20 bp, Homo sapiens
  source 1..20: mol_type = genomic DNA
gaaataaaaacttgggctct

SEQ ID NO: 163838 - DNA, 20 bp, Homo sapiens
  source 1..20: mol_type = genomic DNA
aaataaaaacttgggctctt

SEQ ID NO: 163839 - DNA, 20 bp, Homo sapiens
  source 1..20: mol_type = genomic DNA
aataaaaacttgggctctta

SEQ ID NO: 163840 - DNA, 20 bp, Homo sapiens
  source 1..20: mol_type = genomic DNA
ataaaaacttgggctcttaa

SEQ ID NO: 163841 - DNA, 20 bp, Homo sapiens
  source 1..20: mol_type = genomic DNA
taaaaacttgggctcttaac

SEQ ID NO: 163842 - DNA, 20 bp, Homo sapiens
  source 1..20: mol_type = genomic DNA
aaaaacttgggctcttaact

SEQ ID NO: 163843 - DNA, 20 bp, Homo sapiens
  source 1..20: mol_type = genomic DNA
aaaacttgggctcttaactt

SEQ ID NO: 163844 - DNA, 20 bp, Homo sapiens
  source 1..20: mol_type = genomic DNA
aaacttgggctcttaacttt

SEQ ID NO: 163845 - DNA, 20 bp, Homo sapiens
  source 1..20: mol_type = genomic DNA
aacttgggctcttaactttt

SEQ ID NO: 163846 - DNA, 20 bp, Homo sapiens
  source 1..20: mol_type = genomic DNA
acttgggctcttaacttttg

SEQ ID NO: 163847 - DNA, 20 bp, Homo sapiens
  source 1..20: mol_type = genomic DNA
cttgggctcttaacttttgt

SEQ ID NO: 163848 - DNA, 20 bp, Homo sapiens
  source 1..20: mol_type = genomic DNA
ttgggctcttaacttttgta

SEQ ID NO: 163849 - DNA, 20 bp, Homo sapiens
  source 1..20: mol_type = genomic DNA
tgggctcttaacttttgtaa

SEQ ID NO: 163850 - DNA, 20 bp, Homo sapiens
  source 1..20: mol_type = genomic DNA
gggctcttaacttttgtaat

SEQ ID NO: 163851 - DNA, 20 bp, Homo sapiens
  source 1..20: mol_type = genomic DNA
ggctcttaacttttgtaatg

SEQ ID NO: 163852 - DNA, 20 bp, Homo sapiens
  source 1..20: mol_type = genomic DNA
gctcttaacttttgtaatga

SEQ ID NO: 163853 - DNA, 20 bp, Homo sapiens
  source 1..20: mol_type = genomic DNA
ctcttaacttttgtaatgat

SEQ ID NO: 163854 - DNA, 20 bp, Homo sapiens
  source 1..20: mol_type = genomic DNA
tcttaacttttgtaatgatc

SEQ ID NO: 163855 - DNA, 20 bp, Homo sapiens
  source 1..20: mol_type = genomic DNA
cttaacttttgtaatgatcc

SEQ ID NO: 163856 - DNA, 20 bp, Homo sapiens
  source 1..20: mol_type = genomic DNA
ttaacttttgtaatgatccc

SEQ ID NO: 163857 - DNA, 20 bp, Homo sapiens
  source 1..20: mol_type = genomic DNA
taacttttgtaatgatccca

SEQ ID NO: 163858 - DNA, 20 bp, Homo sapiens
  source 1..20: mol_type = genomic DNA
aacttttgtaatgatcccag

SEQ ID NO: 163859 - DNA, 20 bp, Homo sapiens
  source 1..20: mol_type = genomic DNA
acttttgtaatgatcccagg

SEQ ID NO: 163860 - DNA, 20 bp, Homo sapiens
  source 1..20: mol_type = genomic DNA
cttttgtaatgatcccaggt

SEQ ID NO: 163861 - DNA, 20 bp, Homo sapiens
  source 1..20: mol_type = genomic DNA
ttttgtaatgatcccaggtg

SEQ ID NO: 163862 - DNA, 20 bp, Homo sapiens
  source 1..20: mol_type = genomic DNA
tttgtaatgatcccaggtgt

SEQ ID NO: 163863 - DNA, 20 bp, Homo sapiens
  source 1..20: mol_type = genomic DNA
ttgtaatgatcccaggtgtt

SEQ ID NO: 163864 - DNA, 20 bp, Homo sapiens
  source 1..20: mol_type = genomic DNA
tgtaatgatcccaggtgttt

SEQ ID NO: 163865 - DNA, 20 bp, Homo sapiens
  source 1..20: mol_type = genomic DNA
gtaatgatcccaggtgtttg

SEQ ID NO: 163866 - DNA, 20 bp, Homo sapiens
  source 1..20: mol_type = genomic DNA
taatgatcccaggtgtttga

SEQ ID NO: 163867 - DNA, 20 bp, Homo sapiens
  source 1..20: mol_type = genomic DNA
aatgatcccaggtgtttgag

SEQ ID NO: 163868 - DNA, 20 bp, Homo sapiens
  source 1..20: mol_type = genomic DNA
atgatcccaggtgtttgagc

SEQ ID NO: 163869 - DNA, 20 bp, Homo sapiens
  source 1..20: mol_type = genomic DNA
tgatcccaggtgtttgagct

SEQ ID NO: 163870 - DNA, 20 bp, Homo sapiens
  source 1..20: mol_type = genomic DNA
gatcccaggtgtttgagctg

SEQ ID NO: 163871 - DNA, 20 bp, Homo sapiens
  source 1..20: mol_type = genomic DNA
atcccaggtgtttgagctgg

SEQ ID NO: 163872 - DNA, 20 bp, Homo sapiens
  source 1..20: mol_type = genomic DNA
tcccaggtgtttgagctggg

SEQ ID NO: 163873 - DNA, 20 bp, Homo sapiens
  source 1..20: mol_type = genomic DNA
cccaggtgtttgagctgggg

SEQ ID NO: 163874 - DNA, 20 bp, Homo sapiens
  source 1..20: mol_type = genomic DNA
ccaggtgtttgagctggggg

SEQ ID NO: 163875 - DNA, 20 bp, Homo sapiens
  source 1..20: mol_type = genomic DNA
caggtgtttgagctgggggt

SEQ ID NO: 163876 - DNA, 20 bp, Homo sapiens
  source 1..20: mol_type = genomic DNA
aggtgtttgagctgggggtt

SEQ ID NO: 163877 - DNA, 20 bp, Homo sapiens
  source 1..20: mol_type = genomic DNA
ggtgtttgagctgggggttg

SEQ ID NO: 163878 - DNA, 20 bp, Homo sapiens
  source 1..20: mol_type = genomic DNA
gtgtttgagctgggggttga

SEQ ID NO: 163879 - DNA, 20 bp, Homo sapiens
  source 1..20: mol_type = genomic DNA
tgtttgagctgggggttgag

SEQ ID NO: 163880 - DNA, 20 bp, Homo sapiens
  source 1..20: mol_type = genomic DNA
gtttgagctgggggttgagg

SEQ ID NO: 163881 - DNA, 20 bp, Homo sapiens
  source 1..20: mol_type = genomic DNA
tttgagctgggggttgaggg

SEQ ID NO: 163882 - DNA, 20 bp, Homo sapiens
  source 1..20: mol_type = genomic DNA
ttgagctgggggttgagggt

SEQ ID NO: 163883 - DNA, 20 bp, Homo sapiens
  source 1..20: mol_type = genomic DNA
tgagctgggggttgagggtg

SEQ ID NO: 163884 - DNA, 20 bp, Homo sapiens
  source 1..20: mol_type = genomic DNA
gagctgggggttgagggtgg

SEQ ID NO: 163885 - DNA, 20 bp, Homo sapiens
  source 1..20: mol_type = genomic DNA
agctgggggttgagggtggg

SEQ ID NO: 163886 - DNA, 20 bp, Homo sapiens
  source 1..20: mol_type = genomic DNA
gctgggggttgagggtgggt

SEQ ID NO: 163887 - DNA, 20 bp, Homo sapiens
  source 1..20: mol_type = genomic DNA
ctgggggttgagggtgggtg

SEQ ID NO: 163888 - DNA, 20 bp, Homo sapiens
  source 1..20: mol_type = genomic DNA
tgggggttgagggtgggtgc

SEQ ID NO: 163889 - DNA, 20 bp, Homo sapiens
  source 1..20: mol_type = genomic DNA
gggggttgagggtgggtgcc

SEQ ID NO: 163890 - DNA, 20 bp, Homo sapiens
  source 1..20: mol_type = genomic DNA
ggggttgagggtgggtgcct

SEQ ID NO: 163891 - DNA, 20 bp, Homo sapiens
  source 1..20: mol_type = genomic DNA
gggttgagggtgggtgcctc

SEQ ID NO: 163892 - DNA, 20 bp, Homo sapiens
  source 1..20: mol_type = genomic DNA
ggttgagggtgggtgcctcg

SEQ ID NO: 163893 - DNA, 20 bp, Homo sapiens
  source 1..20: mol_type = genomic DNA
gttgagggtgggtgcctcga

SEQ ID NO: 163894 - DNA, 20 bp, Homo sapiens
  source 1..20: mol_type = genomic DNA
ttgagggtgggtgcctcgag

SEQ ID NO: 163895 - DNA, 20 bp, Homo sapiens
  source 1..20: mol_type = genomic DNA
tgagggtgggtgcctcgagc

SEQ ID NO: 163896 - DNA, 20 bp, Homo sapiens
  source 1..20: mol_type = genomic DNA
gagggtgggtgcctcgagca

SEQ ID NO: 163897 - DNA, 20 bp, Homo sapiens
  source 1..20: mol_type = genomic DNA
agggtgggtgcctcgagcaa

SEQ ID NO: 163898 - DNA, 20 bp, Homo sapiens
  source 1..20: mol_type = genomic DNA
gggtgggtgcctcgagcaaa

SEQ ID NO: 163899 - DNA, 20 bp, Homo sapiens
  source 1..20: mol_type = genomic DNA
ggtgggtgcctcgagcaaag

SEQ ID NO: 163900 - DNA, 20 bp, Homo sapiens
  source 1..20: mol_type = genomic DNA
gtgggtgcctcgagcaaagg

SEQ ID NO: 163901 - DNA, 20 bp, Homo sapiens
  source 1..20: mol_type = genomic DNA
tgggtgcctcgagcaaaggg

SEQ ID NO: 163902 - DNA, 20 bp, Homo sapiens
  source 1..20: mol_type = genomic DNA
gggtgcctcgagcaaagggg

SEQ ID NO: 163903 - DNA, 20 bp, Homo sapiens
  source 1..20: mol_type = genomic DNA
ggtgcctcgagcaaaggggc

SEQ ID NO: 163904 - DNA, 20 bp, Homo sapiens
  source 1..20: mol_type = genomic DNA
gtgcctcgagcaaaggggct

SEQ ID NO: 163905 - DNA, 20 bp, Homo sapiens
  source 1..20: mol_type = genomic DNA
tgcctcgagcaaaggggctg

SEQ ID NO: 163906 - DNA, 20 bp, Homo sapiens
  source 1..20: mol_type = genomic DNA
gcctcgagcaaaggggctgc

SEQ ID NO: 163907 - DNA, 20 bp, Homo sapiens
  source 1..20: mol_type = genomic DNA
cctcgagcaaaggggctgca

SEQ ID NO: 163908 - DNA, 20 bp, Homo sapiens
  source 1..20: mol_type = genomic DNA
ctcgagcaaaggggctgcat

SEQ ID NO: 163909 - DNA, 20 bp, Homo sapiens
  source 1..20: mol_type = genomic DNA
tcgagcaaaggggctgcatt

SEQ ID NO: 163910 - DNA, 20 bp, Homo sapiens
  source 1..20: mol_type = genomic DNA
cgagcaaaggggctgcattt

SEQ ID NO: 163911 - DNA, 20 bp, Homo sapiens
  source 1..20: mol_type = genomic DNA
gagcaaaggggctgcattta

SEQ ID NO: 163912 - DNA, 20 bp, Homo sapiens
  source 1..20: mol_type = genomic DNA
agcaaaggggctgcatttat

SEQ ID NO: 163913 - DNA, 20 bp, Homo sapiens
  source 1..20: mol_type = genomic DNA
gcaaaggggctgcatttatt

SEQ ID NO: 163914 - DNA, 20 bp, Homo sapiens
  source 1..20: mol_type = genomic DNA
caaaggggctgcatttattt

SEQ ID NO: 163915 - DNA, 20 bp, Homo sapiens
  source 1..20: mol_type = genomic DNA
aaaggggctgcatttatttg

SEQ ID NO: 163916 - DNA, 20 bp, Homo sapiens
  source 1..20: mol_type = genomic DNA
aaggggctgcatttatttgc

SEQ ID NO: 163917 - DNA, 20 bp, Homo sapiens
  source 1..20: mol_type = genomic DNA
aggggctgcatttatttgca

SEQ ID NO: 163918 - DNA, 20 bp, Homo sapiens
  source 1..20: mol_type = genomic DNA
ggggctgcatttatttgcat

SEQ ID NO: 163919 - DNA, 20 bp, Homo sapiens
  source 1..20: mol_type = genomic DNA
gggctgcatttatttgcata

SEQ ID NO: 163920 - DNA, 20 bp, Homo sapiens
  source 1..20: mol_type = genomic DNA
ggctgcatttatttgcataa

SEQ ID NO: 163921 - DNA, 20 bp, Homo sapiens
  source 1..20: mol_type = genomic DNA
gctgcatttatttgcataat

SEQ ID NO: 163922 - DNA, 20 bp, Homo sapiens
  source 1..20: mol_type = genomic DNA
ctgcatttatttgcataatg

SEQ ID NO: 163923 - DNA, 20 bp, Homo sapiens
  source 1..20: mol_type = genomic DNA
tgcatttatttgcataatgc

SEQ ID NO: 163924 - DNA, 20 bp, Homo sapiens
  source 1..20: mol_type = genomic DNA
gcatttatttgcataatgcc

SEQ ID NO: 163925 - DNA, 20 bp, Homo sapiens
  source 1..20: mol_type = genomic DNA
catttatttgcataatgcca

SEQ ID NO: 163926 - DNA, 20 bp, Homo sapiens
  source 1..20: mol_type = genomic DNA
atttatttgcataatgccat

SEQ ID NO: 163927 - DNA, 20 bp, Homo sapiens
  source 1..20: mol_type = genomic DNA
tttatttgcataatgccatg

SEQ ID NO: 163928 - DNA, 20 bp, Homo sapiens
  source 1..20: mol_type = genomic DNA
ttatttgcataatgccatgt

SEQ ID NO: 163929 - DNA, 20 bp, Homo sapiens
  source 1..20: mol_type = genomic DNA
tatttgcataatgccatgta

SEQ ID NO: 163930 - DNA, 20 bp, Homo sapiens
  source 1..20: mol_type = genomic DNA
atttgcataatgccatgtaa

SEQ ID NO: 163931 - DNA, 20 bp, Homo sapiens
  source 1..20: mol_type = genomic DNA
tttgcataatgccatgtaag

SEQ ID NO: 163932 - DNA, 20 bp, Homo sapiens
  source 1..20: mol_type = genomic DNA
ttgcataatgccatgtaaga

SEQ ID NO: 163933 - DNA, 20 bp, Homo sapiens
  source 1..20: mol_type = genomic DNA
tgcataatgccatgtaagag

SEQ ID NO: 163934 - DNA, 20 bp, Homo sapiens
  source 1..20: mol_type = genomic DNA
gcataatgccatgtaagagt

SEQ ID NO: 163935 - DNA, 20 bp, Homo sapiens
  source 1..20: mol_type = genomic DNA
cataatgccatgtaagagta

SEQ ID NO: 163936 - DNA, 20 bp, Homo sapiens
  source 1..20: mol_type = genomic DNA
ataatgccatgtaagagtag

SEQ ID NO: 163937 - DNA, 20 bp, Homo sapiens
  source 1..20: mol_type = genomic DNA
taatgccatgtaagagtagc

SEQ ID NO: 163938 - DNA, 20 bp, Homo sapiens
  source 1..20: mol_type = genomic DNA
aatgccatgtaagagtagct

SEQ ID NO: 163939 - DNA, 20 bp, Homo sapiens
  source 1..20: mol_type = genomic DNA
atgccatgtaagagtagctc

SEQ ID NO: 163940 - DNA, 20 bp, Homo sapiens
  source 1..20: mol_type = genomic DNA
tgccatgtaagagtagctct

SEQ ID NO: 163941 - DNA, 20 bp, Homo sapiens
  source 1..20: mol_type = genomic DNA
gccatgtaagagtagctcta

SEQ ID NO: 163942 - DNA, 20 bp, Homo sapiens
  source 1..20: mol_type = genomic DNA
ccatgtaagagtagctctac

SEQ ID NO: 163943 - DNA, 20 bp, Homo sapiens
  source 1..20: mol_type = genomic DNA
catgtaagagtagctctaca

SEQ ID NO: 163944 - DNA, 20 bp, Homo sapiens
  source 1..20: mol_type = genomic DNA
atgtaagagtagctctacac

SEQ ID NO: 163945 - DNA, 20 bp, Homo sapiens
  source 1..20: mol_type = genomic DNA
tgtaagagtagctctacacc

SEQ ID NO: 163946 - DNA, 20 bp, Homo sapiens
  source 1..20: mol_type = genomic DNA
gtaagagtagctctacaccc

SEQ ID NO: 163947 - DNA, 20 bp, Homo sapiens
  source 1..20: mol_type = genomic DNA
taagagtagctctacacccc

SEQ ID NO: 163948 - DNA, 20 bp, Homo sapiens
  source 1..20: mol_type = genomic DNA
aagagtagctctacacccca

SEQ ID NO: 163949 - DNA, 20 bp, Homo sapiens
  source 1..20: mol_type = genomic DNA
agagtagctctacaccccaa

SEQ ID NO: 163950 - DNA, 20 bp, Homo sapiens
  source 1..20: mol_type = genomic DNA
gagtagctctacaccccaaa

SEQ ID NO: 163951 - DNA, 20 bp, Homo sapiens
  source 1..20: mol_type = genomic DNA
agtagctctacaccccaaac

SEQ ID NO: 163952 - DNA, 20 bp, Homo sapiens
  source 1..20: mol_type = genomic DNA
gtagctctacaccccaaaca

SEQ ID NO: 163953 - DNA, 20 bp, Homo sapiens
  source 1..20: mol_type = genomic DNA
tagctctacaccccaaacac

SEQ ID NO: 163954 - DNA, 20 bp, Homo sapiens
  source 1..20: mol_type = genomic DNA
agctctacaccccaaacaca

SEQ ID NO: 163955 - DNA, 20 bp, Homo sapiens
  source 1..20: mol_type = genomic DNA
gctctacaccccaaacacag

SEQ ID NO: 163956 - DNA, 20 bp, Homo sapiens
  source 1..20: mol_type = genomic DNA
ctctacaccccaaacacagg

SEQ ID NO: 163957 - DNA, 20 bp, Homo sapiens
  source 1..20: mol_type = genomic DNA
tctacaccccaaacacaggc

SEQ ID NO: 163958 - DNA, 20 bp, Homo sapiens
  source 1..20: mol_type = genomic DNA
ctacaccccaaacacaggct

SEQ ID NO: 163959 - DNA, 20 bp, Homo sapiens
  source 1..20: mol_type = genomic DNA
tacaccccaaacacaggctt

SEQ ID NO: 163960 - DNA, 20 bp, Homo sapiens
  source 1..20: mol_type = genomic DNA
acaccccaaacacaggcttc

SEQ ID NO: 163961 - DNA, 20 bp, Homo sapiens
  source 1..20: mol_type = genomic DNA
caccccaaacacaggcttct

SEQ ID NO: 163962 - DNA, 20 bp, Homo sapiens
  source 1..20: mol_type = genomic DNA
accccaaacacaggcttctt

SEQ ID NO: 163963 - DNA, 20 bp, Homo sapiens
  source 1..20: mol_type = genomic DNA
ccccaaacacaggcttctta

SEQ ID NO: 163964 - DNA, 20 bp, Homo sapiens
  source 1..20: mol_type = genomic DNA
cccaaacacaggcttcttag

SEQ ID NO: 163965 - DNA, 20 bp, Homo sapiens
  source 1..20: mol_type = genomic DNA
ccaaacacaggcttcttagt

SEQ ID NO: 163966 - DNA, 20 bp, Homo sapiens
  source 1..20: mol_type = genomic DNA
caaacacaggcttcttagtg

SEQ ID NO: 163967 - DNA, 20 bp, Homo sapiens
  source 1..20: mol_type = genomic DNA
aaacacaggcttcttagtgg

SEQ ID NO: 163968 - DNA, 20 bp, Homo sapiens
  source 1..20: mol_type = genomic DNA
aacacaggcttcttagtggg

SEQ ID NO: 163969 - DNA, 20 bp, Homo sapiens
  source 1..20: mol_type = genomic DNA
acacaggcttcttagtggga

SEQ ID NO: 163970 - DNA, 20 bp, Homo sapiens
  source 1..20: mol_type = genomic DNA
cacaggcttcttagtgggac

SEQ ID NO: 163971 - DNA, 20 bp, Homo sapiens
  source 1..20: mol_type = genomic DNA
acaggcttcttagtgggacc

SEQ ID NO: 163972 - DNA, 20 bp, Homo sapiens
  source 1..20: mol_type = genomic DNA
caggcttcttagtgggacca

SEQ ID NO: 163973 - DNA, 20 bp, Homo sapiens
  source 1..20: mol_type = genomic DNA
aggcttcttagtgggaccaa

SEQ ID NO: 163974 - DNA, 20 bp, Homo sapiens
  source 1..20: mol_type = genomic DNA
ggcttcttagtgggaccaaa

SEQ ID NO: 163975 - DNA, 20 bp, Homo sapiens
  source 1..20: mol_type = genomic DNA
gcttcttagtgggaccaaag

SEQ ID NO: 163976 - DNA, 20 bp, Homo sapiens
  source 1..20: mol_type = genomic DNA
cttcttagtgggaccaaagt

SEQ ID NO: 163977 - DNA, 20 bp, Homo sapiens
  source 1..20: mol_type = genomic DNA
ttcttagtgggaccaaagta

SEQ ID NO: 163978 - DNA, 20 bp, Homo sapiens
  source 1..20: mol_type = genomic DNA
tcttagtgggaccaaagtat

SEQ ID NO: 163979 - DNA, 20 bp, Homo sapiens
  source 1..20: mol_type = genomic DNA
cttagtgggaccaaagtatg

SEQ ID NO: 163980 - DNA, 20 bp, Homo sapiens
  source 1..20: mol_type = genomic DNA
ttagtgggaccaaagtatga

SEQ ID NO: 163981 - DNA, 20 bp, Homo sapiens
  source 1..20: mol_type = genomic DNA
tagtgggaccaaagtatgat

SEQ ID NO: 163982 - DNA, 20 bp, Homo sapiens
  source 1..20: mol_type = genomic DNA
agtgggaccaaagtatgata

SEQ ID NO: 163983 - DNA, 20 bp, Homo sapiens
  source 1..20: mol_type = genomic DNA
gtgggaccaaagtatgatac

SEQ ID NO: 163984 - DNA, 20 bp, Homo sapiens
  source 1..20: mol_type = genomic DNA
tgggaccaaagtatgataca

SEQ ID NO: 163985 - DNA, 20 bp, Homo sapiens
  source 1..20: mol_type = genomic DNA
gggaccaaagtatgatacaa

SEQ ID NO: 163986 - DNA, 20 bp, Homo sapiens
  source 1..20: mol_type = genomic DNA
ggaccaaagtatgatacaaa

SEQ ID NO: 163987 - DNA, 20 bp, Homo sapiens
  source 1..20: mol_type = genomic DNA
gaccaaagtatgatacaaac

SEQ ID NO: 163988 - DNA, 20 bp, Homo sapiens
  source 1..20: mol_type = genomic DNA
accaaagtatgatacaaact

SEQ ID NO: 163989 - DNA, 20 bp, Homo sapiens
  source 1..20: mol_type = genomic DNA
ccaaagtatgatacaaactg

SEQ ID NO: 163990 - DNA, 20 bp, Homo sapiens
  source 1..20: mol_type = genomic DNA
caaagtatgatacaaactga

SEQ ID NO: 163991 - DNA, 20 bp, Homo sapiens
  source 1..20: mol_type = genomic DNA
aaagtatgatacaaactgaa

SEQ ID NO: 163992 - DNA, 20 bp, Homo sapiens
  source 1..20: mol_type = genomic DNA
aagtatgatacaaactgaag

SEQ ID NO: 163993 - DNA, 20 bp, Homo sapiens
  source 1..20: mol_type = genomic DNA
agtatgatacaaactgaaga

SEQ ID NO: 163994 - DNA, 20 bp, Homo sapiens
  source 1..20: mol_type = genomic DNA
gtatgatacaaactgaagat

SEQ ID NO: 163995 - DNA, 20 bp, Homo sapiens
  source 1..20: mol_type = genomic DNA
tatgatacaaactgaagatg

SEQ ID NO: 163996 - DNA, 20 bp, Homo sapiens
  source 1..20: mol_type = genomic DNA
atgatacaaactgaagatgg

SEQ ID NO: 163997 - DNA, 20 bp, Homo sapiens
  source 1..20: mol_type = genomic DNA
tgatacaaactgaagatgga

SEQ ID NO: 163998 - DNA, 20 bp, Homo sapiens
  source 1..20: mol_type = genomic DNA
gatacaaactgaagatggaa

SEQ ID NO: 163999 - DNA, 20 bp, Homo sapiens
  source 1..20: mol_type = genomic DNA
atacaaactgaagatggaat

SEQ ID NO: 164000 - DNA, 20 bp, Homo sapiens
  source 1..20: mol_type = genomic DNA
tacaaactgaagatggaatg

SEQ ID NO: 164001 - DNA, 20 bp, Homo sapiens
  source 1..20: mol_type = genomic DNA
acaaactgaagatggaatgc

SEQ ID NO: 164002 - DNA, 20 bp, Homo sapiens
  source 1..20: mol_type = genomic DNA
caaactgaagatggaatgca

SEQ ID NO: 164003 - DNA, 20 bp, Homo sapiens
  source 1..20: mol_type = genomic DNA
aaactgaagatggaatgcag

SEQ ID NO: 164004 - DNA, 20 bp, Homo sapiens
  source 1..20: mol_type = genomic DNA
aactgaagatggaatgcaga

SEQ ID NO: 164005 - DNA, 20 bp, Homo sapiens
  source 1..20: mol_type = genomic DNA
actgaagatggaatgcagag

SEQ ID NO: 164006 - DNA, 20 bp, Homo sapiens
  source 1..20: mol_type = genomic DNA
ctgaagatggaatgcagagg

SEQ ID NO: 164007 - DNA, 20 bp, Homo sapiens
  source 1..20: mol_type = genomic DNA
tgaagatggaatgcagagga

SEQ ID NO: 164008 - DNA, 20 bp, Homo sapiens
  source 1..20: mol_type = genomic DNA
gaagatggaatgcagaggat

SEQ ID NO: 164009 - DNA, 20 bp, Homo sapiens
  source 1..20: mol_type = genomic DNA
aagatggaatgcagaggatt

SEQ ID NO: 164010 - DNA, 20 bp, Homo sapiens
  source 1..20: mol_type = genomic DNA
agatggaatgcagaggatta

SEQ ID NO: 164011 - DNA, 20 bp, Homo sapiens
  source 1..20: mol_type = genomic DNA
gatggaatgcagaggattat

SEQ ID NO: 164012 - DNA, 20 bp, Homo sapiens
  source 1..20: mol_type = genomic DNA
atggaatgcagaggattatt

SEQ ID NO: 164013 - DNA, 20 bp, Homo sapiens
  source 1..20: mol_type = genomic DNA
tggaatgcagaggattattg

SEQ ID NO: 164014 - DNA, 20 bp, Homo sapiens
  source 1..20: mol_type = genomic DNA
ggaatgcagaggattattgg

SEQ ID NO: 164015 - DNA, 20 bp, Homo sapiens
  source 1..20: mol_type = genomic DNA
gaatgcagaggattattggt

SEQ ID NO: 164016 - DNA, 20 bp, Homo sapiens
  source 1..20: mol_type = genomic DNA
aatgcagaggattattggta

SEQ ID NO: 164017 - DNA, 20 bp, Homo sapiens
  source 1..20: mol_type = genomic DNA
atgcagaggattattggtac

SEQ ID NO: 164018 - DNA, 20 bp, Homo sapiens
  source 1..20: mol_type = genomic DNA
tgcagaggattattggtact

SEQ ID NO: 164019 - DNA, 20 bp, Homo sapiens
  source 1..20: mol_type = genomic DNA
gcagaggattattggtactt

SEQ ID NO: 164020 - DNA, 20 bp, Homo sapiens
  source 1..20: mol_type = genomic DNA
cagaggattattggtacttt

SEQ ID NO: 164021 - DNA, 20 bp, Homo sapiens
  source 1..20: mol_type = genomic DNA
agaggattattggtactttg

SEQ ID NO: 164022 - DNA, 20 bp, Homo sapiens
  source 1..20: mol_type = genomic DNA
gaggattattggtactttgg

SEQ ID NO: 164023 - DNA, 20 bp, Homo sapiens
  source 1..20: mol_type = genomic DNA
aggattattggtactttgga

SEQ ID NO: 164024 - DNA, 20 bp, Homo sapiens
  source 1..20: mol_type = genomic DNA
ggattattggtactttggaa

SEQ ID NO: 164025 - DNA, 20 bp, Homo sapiens
  source 1..20: mol_type = genomic DNA
gattattggtactttggaat

SEQ ID NO: 164026 - DNA, 20 bp, Homo sapiens
  source 1..20: mol_type = genomic DNA
attattggtactttggaata

SEQ ID NO: 164027 - DNA, 20 bp, Homo sapiens
  source 1..20: mol_type = genomic DNA
ttattggtactttggaatat

SEQ ID NO: 164028 - DNA, 20 bp, Homo sapiens
  source 1..20: mol_type = genomic DNA
tattggtactttggaatatg

SEQ ID NO: 164029 - DNA, 20 bp, Homo sapiens
  source 1..20: mol_type = genomic DNA
attggtactttggaatatgc

SEQ ID NO: 164030 - DNA, 20 bp, Homo sapiens
  source 1..20: mol_type = genomic DNA
ttggtactttggaatatgct

SEQ ID NO: 164031 - DNA, 20 bp, Homo sapiens
  source 1..20: mol_type = genomic DNA
tggtactttggaatatgctt

SEQ ID NO: 164032 - DNA, 20 bp, Homo sapiens
  source 1..20: mol_type = genomic DNA
ggtactttggaatatgctta

SEQ ID NO: 164033 - DNA, 20 bp, Homo sapiens
  source 1..20: mol_type = genomic DNA
gtactttggaatatgcttaa

SEQ ID NO: 164034 - DNA, 20 bp, Homo sapiens
  source 1..20: mol_type = genomic DNA
tactttggaatatgcttaaa

SEQ ID NO: 164035 - DNA, 20 bp, Homo sapiens
  source 1..20: mol_type = genomic DNA
actttggaatatgcttaaaa

SEQ ID NO: 164036 - DNA, 20 bp, Homo sapiens
  source 1..20: mol_type = genomic DNA
ctttggaatatgcttaaaaa

SEQ ID NO: 164037 - DNA, 20 bp, Homo sapiens
  source 1..20: mol_type = genomic DNA
tttggaatatgcttaaaaaa

SEQ ID NO: 164038 - DNA, 20 bp, Homo sapiens
  source 1..20: mol_type = genomic DNA
ttggaatatgcttaaaaaaa

SEQ ID NO: 164039 - DNA, 20 bp, Homo sapiens
  source 1..20: mol_type = genomic DNA
tggaatatgcttaaaaaaaa

SEQ ID NO: 164040 - DNA, 20 bp, Homo sapiens
  source 1..20: mol_type = genomic DNA
ggaatatgcttaaaaaaaat

SEQ ID NO: 164041 - DNA, 20 bp, Homo sapiens
  source 1..20: mol_type = genomic DNA
gaatatgcttaaaaaaaatt

SEQ ID NO: 164042 - DNA, 20 bp, Homo sapiens
  source 1..20: mol_type = genomic DNA
aatatgcttaaaaaaaattt

SEQ ID NO: 164043 - DNA, 20 bp, Homo sapiens
  source 1..20: mol_type = genomic DNA
atatgcttaaaaaaaatttt

SEQ ID NO: 164044 - DNA, 20 bp, Homo sapiens
  source 1..20: mol_type = genomic DNA
tatgcttaaaaaaaattttt

SEQ ID NO: 164045 - DNA, 20 bp, Homo sapiens
  source 1..20: mol_type = genomic DNA
atgcttaaaaaaaatttttt

SEQ ID NO: 164046 - DNA, 20 bp, Homo sapiens
  source 1..20: mol_type = genomic DNA
tgcttaaaaaaaattttttt

SEQ ID NO: 164047 - DNA, 20 bp, Homo sapiens
  source 1..20: mol_type = genomic DNA
gcttaaaaaaaattttttta

SEQ ID NO: 164048 - DNA, 20 bp, Homo sapiens
  source 1..20: mol_type = genomic DNA
cttaaaaaaaatttttttaa

SEQ ID NO: 164049 - DNA, 20 bp, Homo sapiens
  source 1..20: mol_type = genomic DNA
ttaaaaaaaatttttttaaa

SEQ ID NO: 164050 - DNA, 20 bp, Homo sapiens
  source 1..20: mol_type = genomic DNA
taaaaaaaatttttttaaag

SEQ ID NO: 164051 - DNA, 20 bp, Homo sapiens
  source 1..20: mol_type = genomic DNA
aaaaaaaatttttttaaagt

SEQ ID NO: 164052 - DNA, 20 bp, Homo sapiens
  source 1..20: mol_type = genomic DNA
aaaaaaatttttttaaagta

SEQ ID NO: 164053 - DNA, 20 bp, Homo sapiens
  source 1..20: mol_type = genomic DNA
aaaaaatttttttaaagtat

SEQ ID NO: 164054 - DNA, 20 bp, Homo sapiens
  source 1..20: mol_type = genomic DNA
aaaaatttttttaaagtatt

SEQ ID NO: 164055 - DNA, 20 bp, Homo sapiens
  source 1..20: mol_type = genomic DNA
aaaatttttttaaagtattt

SEQ ID NO: 164056 - DNA, 20 bp, Homo sapiens
  source 1..20: mol_type = genomic DNA
aaatttttttaaagtatttt

SEQ ID NO: 164057 - DNA, 20 bp, Homo sapiens
  source 1..20: mol_type = genomic DNA
aatttttttaaagtattttt

SEQ ID NO: 164058 - DNA, 20 bp, Homo sapiens
  source 1..20: mol_type = genomic DNA
atttttttaaagtattttta

SEQ ID NO: 164059 - DNA, 20 bp, Homo sapiens
  source 1..20: mol_type = genomic DNA
tttttttaaagtatttttaa

SEQ ID NO: 164060 - DNA, 20 bp, Homo sapiens
  source 1..20: mol_type = genomic DNA
ttttttaaagtatttttaaa

SEQ ID NO: 164061 - DNA, 20 bp, Homo sapiens
  source 1..20: mol_type = genomic DNA
tttttaaagtatttttaaaa

SEQ ID NO: 164062 - DNA, 20 bp, Homo sapiens
  source 1..20: mol_type = genomic DNA
ttttaaagtatttttaaaaa

SEQ ID NO: 164063 - DNA, 20 bp, Homo sapiens
  source 1..20: mol_type = genomic DNA
tttaaagtatttttaaaaaa

SEQ ID NO: 164064 - DNA, 20 bp, Homo sapiens
  source 1..20: mol_type = genomic DNA
ttaaagtatttttaaaaaat

SEQ ID NO: 164065 - DNA, 20 bp, Homo sapiens
  source 1..20: mol_type = genomic DNA
taaagtatttttaaaaaatc

SEQ ID NO: 164066 - DNA, 20 bp, Homo sapiens
  source 1..20: mol_type = genomic DNA
aaagtatttttaaaaaatca

SEQ ID NO: 164067 - DNA, 20 bp, Homo sapiens
  source 1..20: mol_type = genomic DNA
aagtatttttaaaaaatcag

SEQ ID NO: 164068 - DNA, 20 bp, Homo sapiens
  source 1..20: mol_type = genomic DNA
agtatttttaaaaaatcagg

SEQ ID NO: 164069 - DNA, 20 bp, Homo sapiens
  source 1..20: mol_type = genomic DNA
gtatttttaaaaaatcaggc

SEQ ID NO: 164070 - DNA, 20 bp, Homo sapiens
  source 1..20: mol_type = genomic DNA
tatttttaaaaaatcaggca

SEQ ID NO: 164071 - DNA, 20 bp, Homo sapiens
  source 1..20: mol_type = genomic DNA
atttttaaaaaatcaggcaa

SEQ ID NO: 164072 - DNA, 20 bp, Homo sapiens
  source 1..20: mol_type = genomic DNA
tttttaaaaaatcaggcaac

SEQ ID NO: 164073 - DNA, 20 bp, Homo sapiens
  source 1..20: mol_type = genomic DNA
ttttaaaaaatcaggcaacc

SEQ ID NO: 164074 - DNA, 20 bp, Homo sapiens
  source 1..20: mol_type = genomic DNA
tttaaaaaatcaggcaaccc

SEQ ID NO: 164075 - DNA, 20 bp, Homo sapiens
  source 1..20: mol_type = genomic DNA
ttaaaaaatcaggcaacccc

SEQ ID NO: 164076 - DNA, 20 bp, Homo sapiens
  source 1..20: mol_type = genomic DNA
taaaaaatcaggcaacccct

SEQ ID NO: 164077 - DNA, 20 bp, Homo sapiens
  source 1..20: mol_type = genomic DNA
aaaaaatcaggcaacccctg

SEQ ID NO: 164078 - DNA, 20 bp, Homo sapiens
  source 1..20: mol_type = genomic DNA
aaaaatcaggcaacccctga

SEQ ID NO: 164079 - DNA, 20 bp, Homo sapiens
  source 1..20: mol_type = genomic DNA
aaaatcaggcaacccctgaa

SEQ ID NO: 164080 - DNA, 20 bp, Homo sapiens
  source 1..20: mol_type = genomic DNA
aaatcaggcaacccctgaac

SEQ ID NO: 164081 - DNA, 20 bp, Homo sapiens
  source 1..20: mol_type = genomic DNA
aatcaggcaacccctgaacc

SEQ ID NO: 164082 - DNA, 20 bp, Homo sapiens
  source 1..20: mol_type = genomic DNA
atcaggcaacccctgaacca

SEQ ID NO: 164083 - DNA, 20 bp, Homo sapiens
  source 1..20: mol_type = genomic DNA
tcaggcaacccctgaaccag

SEQ ID NO: 164084 - DNA, 20 bp, Homo sapiens
  source 1..20: mol_type = genomic DNA
caggcaacccctgaaccaga

SEQ ID NO: 164085 - DNA, 20 bp, Homo sapiens
  source 1..20: mol_type = genomic DNA
aggcaacccctgaaccagag

SEQ ID NO: 164086 - DNA, 20 bp, Homo sapiens
  source 1..20: mol_type = genomic DNA
ggcaacccctgaaccagagt

SEQ ID NO: 164087 - DNA, 20 bp, Homo sapiens
  source 1..20: mol_type = genomic DNA
gcaacccctgaaccagagta

SEQ ID NO: 164088 - DNA, 20 bp, Homo sapiens
  source 1..20: mol_type = genomic DNA
caacccctgaaccagagtag

SEQ ID NO: 164089 - DNA, 20 bp, Homo sapiens
  source 1..20: mol_type = genomic DNA
aacccctgaaccagagtagg

SEQ ID NO: 164090 - DNA, 20 bp, Homo sapiens
  source 1..20: mol_type = genomic DNA
acccctgaaccagagtaggt

SEQ ID NO: 164091 - DNA, 20 bp, Homo sapiens
  source 1..20: mol_type = genomic DNA
cccctgaaccagagtaggtt

SEQ ID NO: 164092 - DNA, 20 bp, Homo sapiens
  source 1..20: mol_type = genomic DNA
ccctgaaccagagtaggttc

SEQ ID NO: 164093 - DNA, 20 bp, Homo sapiens
  source 1..20: mol_type = genomic DNA
cctgaaccagagtaggttca

SEQ ID NO: 164094 - DNA, 20 bp, Homo sapiens
  source 1..20: mol_type = genomic DNA
ctgaaccagagtaggttcag

SEQ ID NO: 164095 - DNA, 20 bp, Homo sapiens
  source 1..20: mol_type = genomic DNA
tgaaccagagtaggttcaga

SEQ ID NO: 164096 - DNA, 20 bp, Homo sapiens
  source 1..20: mol_type = genomic DNA
gaaccagagtaggttcagag

SEQ ID NO: 164097 - DNA, 20 bp, Homo sapiens
  source 1..20: mol_type = genomic DNA
aaccagagtaggttcagaga

SEQ ID NO: 164098 - DNA, 20 bp, Homo sapiens
  source 1..20: mol_type = genomic DNA
accagagtaggttcagagaa

SEQ ID NO: 164099 - DNA, 20 bp, Homo sapiens
  source 1..20: mol_type = genomic DNA
ccagagtaggttcagagaaa

SEQ ID NO: 164100 - DNA, 20 bp, Homo sapiens
  source 1..20: mol_type = genomic DNA
cagagtaggttcagagaaac

SEQ ID NO: 164101 - DNA, 20 bp, Homo sapiens
  source 1..20: mol_type = genomic DNA
agagtaggttcagagaaact

SEQ ID NO: 164102 - DNA, 20 bp, Homo sapiens
  source 1..20: mol_type = genomic DNA
gagtaggttcagagaaactg

SEQ ID NO: 164103 - DNA, 20 bp, Homo sapiens
  source 1..20: mol_type = genomic DNA
agtaggttcagagaaactgc

SEQ ID NO: 164104 - DNA, 20 bp, Homo sapiens
  source 1..20: mol_type = genomic DNA
gtaggttcagagaaactgcc

SEQ ID NO: 164105 - DNA, 20 bp, Homo sapiens
  source 1..20: mol_type = genomic DNA
taggttcagagaaactgcca

SEQ ID NO: 164106 - DNA, 20 bp, Homo sapiens
  source 1..20: mol_type = genomic DNA
aggttcagagaaactgccaa

SEQ ID NO: 164107 - DNA, 20 bp, Homo sapiens
  source 1..20: mol_type = genomic DNA
ggttcagagaaactgccaaa

SEQ ID NO: 164108 - DNA, 20 bp, Homo sapiens
  source 1..20: mol_type = genomic DNA
gttcagagaaactgccaaat

SEQ ID NO: 164109 - DNA, 20 bp, Homo sapiens
  source 1..20: mol_type = genomic DNA
ttcagagaaactgccaaatt

SEQ ID NO: 164110 - DNA, 20 bp, Homo sapiens
  source 1..20: mol_type = genomic DNA
tcagagaaactgccaaattt

SEQ ID NO: 164111 - DNA, 20 bp, Homo sapiens
  source 1..20: mol_type = genomic DNA
cagagaaactgccaaatttt

SEQ ID NO: 164112 - DNA, 20 bp, Homo sapiens
  source 1..20: mol_type = genomic DNA
agagaaactgccaaatttta

SEQ ID NO: 164113 - DNA, 20 bp, Homo sapiens
  source 1..20: mol_type = genomic DNA
gagaaactgccaaattttat

SEQ ID NO: 164114 - DNA, 20 bp, Homo sapiens
  source 1..20: mol_type = genomic DNA
agaaactgccaaattttatt

SEQ ID NO: 164115 - DNA, 20 bp, Homo sapiens
  source 1..20: mol_type = genomic DNA
gaaactgccaaattttattt

SEQ ID NO: 164116 - DNA, 20 bp, Homo sapiens
  source 1..20: mol_type = genomic DNA
aaactgccaaattttatttt

SEQ ID NO: 164117 - DNA, 20 bp, Homo sapiens
  source 1..20: mol_type = genomic DNA
aactgccaaattttattttc

SEQ ID NO: 164118 - DNA, 20 bp, Homo sapiens
  source 1..20: mol_type = genomic DNA
actgccaaattttattttct

SEQ ID NO: 164119 - DNA, 20 bp, Homo sapiens
  source 1..20: mol_type = genomic DNA
ctgccaaattttattttctt

SEQ ID NO: 164120 - DNA, 20 bp, Homo sapiens
  source 1..20: mol_type = genomic DNA
tgccaaattttattttctta

SEQ ID NO: 164121 - DNA, 20 bp, Homo sapiens
  source 1..20: mol_type = genomic DNA
gccaaattttattttcttaa

SEQ ID NO: 164122 - DNA, 20 bp, Homo sapiens
  source 1..20: mol_type = genomic DNA
ccaaattttattttcttaat

SEQ ID NO: 164123 - DNA, 20 bp, Homo sapiens
  source 1..20: mol_type = genomic DNA
caaattttattttcttaatt

SEQ ID NO: 164124 - DNA, 20 bp, Homo sapiens
  source 1..20: mol_type = genomic DNA
aaattttattttcttaattt

SEQ ID NO: 164125 - DNA, 20 bp, Homo sapiens
  source 1..20: mol_type = genomic DNA
aattttattttcttaatttg

SEQ ID NO: 164126 - DNA, 20 bp, Homo sapiens
  source 1..20: mol_type = genomic DNA
attttattttcttaatttgg

SEQ ID NO: 164127 - DNA, 20 bp, Homo sapiens
  source 1..20: mol_type = genomic DNA
ttttattttcttaatttggg

SEQ ID NO: 164128 - DNA, 20 bp, Homo sapiens
  source 1..20: mol_type = genomic DNA
tttattttcttaatttggga

SEQ ID NO: 164129 - DNA, 20 bp, Homo sapiens
  source 1..20: mol_type = genomic DNA
ttattttcttaatttgggat

SEQ ID NO: 164130 - DNA, 20 bp, Homo sapiens
  source 1..20: mol_type = genomic DNA
tattttcttaatttgggatt

SEQ ID NO: 164131 - DNA, 20 bp, Homo sapiens
  source 1..20: mol_type = genomic DNA
attttcttaatttgggattg

SEQ ID NO: 164132 - DNA, 20 bp, Homo sapiens
  source 1..20: mol_type = genomic DNA
ttttcttaatttgggattgg

SEQ ID NO: 164133 - DNA, 20 bp, Homo sapiens
  source 1..20: mol_type = genomic DNA
tttcttaatttgggattgga

SEQ ID NO: 164134 - DNA, 20 bp, Homo sapiens
  source 1..20: mol_type = genomic DNA
ttcttaatttgggattggaa

SEQ ID NO: 164135 - DNA, 20 bp, Homo sapiens
  source 1..20: mol_type = genomic DNA
tcttaatttgggattggaag

SEQ ID NO: 164136 - DNA, 20 bp, Homo sapiens
  source 1..20: mol_type = genomic DNA
cttaatttgggattggaagc

SEQ ID NO: 164137 - DNA, 20 bp, Homo sapiens
  source 1..20: mol_type = genomic DNA
ttaatttgggattggaagca

SEQ ID NO: 164138 - DNA, 20 bp, Homo sapiens
  source 1..20: mol_type = genomic DNA
taatttgggattggaagcaa

SEQ ID NO: 164139 - DNA, 20 bp, Homo sapiens
  source 1..20: mol_type = genomic DNA
aatttgggattggaagcaag

SEQ ID NO: 164140 - DNA, 20 bp, Homo sapiens
  source 1..20: mol_type = genomic DNA
atttgggattggaagcaagt

SEQ ID NO: 164141 - DNA, 20 bp, Homo sapiens
  source 1..20: mol_type = genomic DNA
tttgggattggaagcaagtt

SEQ ID NO: 164142 - DNA, 20 bp, Homo sapiens
  source 1..20: mol_type = genomic DNA
ttgggattggaagcaagtta

SEQ ID NO: 164143 - DNA, 20 bp, Homo sapiens
  source 1..20: mol_type = genomic DNA
tgggattggaagcaagttaa

SEQ ID NO: 164144 - DNA, 20 bp, Homo sapiens
  source 1..20: mol_type = genomic DNA
gggattggaagcaagttaac

SEQ ID NO: 164145 - DNA, 20 bp, Homo sapiens
  source 1..20: mol_type = genomic DNA
ggattggaagcaagttaaca

SEQ ID NO: 164146 - DNA, 20 bp, Homo sapiens
  source 1..20: mol_type = genomic DNA
gattggaagcaagttaacag

SEQ ID NO: 164147 - DNA, 20 bp, Homo sapiens
  source 1..20: mol_type = genomic DNA
attggaagcaagttaacaga

SEQ ID NO: 164148 - DNA, 20 bp, Homo sapiens
  source 1..20: mol_type = genomic DNA
ttggaagcaagttaacagaa

SEQ ID NO: 164149 - DNA, 20 bp, Homo sapiens
  source 1..20: mol_type = genomic DNA
tggaagcaagttaacagaag

SEQ ID NO: 164150 - DNA, 20 bp, Homo sapiens
  source 1..20: mol_type = genomic DNA
ggaagcaagttaacagaagt

SEQ ID NO: 164151 - DNA, 20 bp, Homo sapiens
  source 1..20: mol_type = genomic DNA
gaagcaagttaacagaagtt

SEQ ID NO: 164152 - DNA, 20 bp, Homo sapiens
  source 1..20: mol_type = genomic DNA
aagcaagttaacagaagttt

SEQ ID NO: 164153 - DNA, 20 bp, Homo sapiens
  source 1..20: mol_type = genomic DNA
agcaagttaacagaagttta

SEQ ID NO: 164154 - DNA, 20 bp, Homo sapiens
  source 1..20: mol_type = genomic DNA
gcaagttaacagaagtttat

SEQ ID NO: 164155 - DNA, 20 bp, Homo sapiens
  source 1..20: mol_type = genomic DNA
caagttaacagaagtttatg

SEQ ID NO: 164156 - DNA, 20 bp, Homo sapiens
  source 1..20: mol_type = genomic DNA
aagttaacagaagtttatga

SEQ ID NO: 164157 - DNA, 20 bp, Homo sapiens
  source 1..20: mol_type = genomic DNA
agttaacagaagtttatgag

SEQ ID NO: 164158 - DNA, 20 bp, Homo sapiens
  source 1..20: mol_type = genomic DNA
gttaacagaagtttatgagt

SEQ ID NO: 164159 - DNA, 20 bp, Homo sapiens
  source 1..20: mol_type = genomic DNA
ttaacagaagtttatgagtt

SEQ ID NO: 164160 - DNA, 20 bp, Homo sapiens
  source 1..20: mol_type = genomic DNA
taacagaagtttatgagtta

SEQ ID NO: 164161 - DNA, 20 bp, Homo sapiens
  source 1..20: mol_type = genomic DNA
aacagaagtttatgagttaa

SEQ ID NO: 164162 - DNA, 20 bp, Homo sapiens
  source 1..20: mol_type = genomic DNA
acagaagtttatgagttaag

SEQ ID NO: 164163 - DNA, 20 bp, Homo sapiens
  source 1..20: mol_type = genomic DNA
cagaagtttatgagttaagt

SEQ ID NO: 164164 - DNA, 20 bp, Homo sapiens
  source 1..20: mol_type = genomic DNA
agaagtttatgagttaagtt

SEQ ID NO: 164165 - DNA, 20 bp, Homo sapiens
  source 1..20: mol_type = genomic DNA
gaagtttatgagttaagttg

SEQ ID NO: 164166 - DNA, 20 bp, Homo sapiens
  source 1..20: mol_type = genomic DNA
aagtttatgagttaagttgc

SEQ ID NO: 164167 - DNA, 20 bp, Homo sapiens
  source 1..20: mol_type = genomic DNA
agtttatgagttaagttgca

SEQ ID NO: 164168 - DNA, 20 bp, Homo sapiens
  source 1..20: mol_type = genomic DNA
gtttatgagttaagttgcat

SEQ ID NO: 164169 - DNA, 20 bp, Homo sapiens
  source 1..20: mol_type = genomic DNA
tttatgagttaagttgcatt

SEQ ID NO: 164170 - DNA, 20 bp, Homo sapiens
  source 1..20: mol_type = genomic DNA
ttatgagttaagttgcattt

SEQ ID NO: 164171 - DNA, 20 bp, Homo sapiens
  source 1..20: mol_type = genomic DNA
tatgagttaagttgcattta

SEQ ID NO: 164172 - DNA, 20 bp, Homo sapiens
  source 1..20: mol_type = genomic DNA
atgagttaagttgcatttag

SEQ ID NO: 164173 - DNA, 20 bp, Homo sapiens
  source 1..20: mol_type = genomic DNA
tgagttaagttgcatttagt

SEQ ID NO: 164174 - DNA, 20 bp, Homo sapiens
  source 1..20: mol_type = genomic DNA
gagttaagttgcatttagtg

SEQ ID NO: 164175 - DNA, 20 bp, Homo sapiens
  source 1..20: mol_type = genomic DNA
agttaagttgcatttagtga

SEQ ID NO: 164176 - DNA, 20 bp, Homo sapiens
  source 1..20: mol_type = genomic DNA
gttaagttgcatttagtgat

SEQ ID NO: 164177 - DNA, 20 bp, Homo sapiens
  source 1..20: mol_type = genomic DNA
ttaagttgcatttagtgatc

SEQ ID NO: 164178 - DNA, 20 bp, Homo sapiens
  source 1..20: mol_type = genomic DNA
taagttgcatttagtgatct

SEQ ID NO: 164179 - DNA, 20 bp, Homo sapiens
  source 1..20: mol_type = genomic DNA
aagttgcatttagtgatctt

SEQ ID NO: 164180 - DNA, 20 bp, Homo sapiens
  source 1..20: mol_type = genomic DNA
agttgcatttagtgatcttt

SEQ ID NO: 164181 - DNA, 20 bp, Homo sapiens
  source 1..20: mol_type = genomic DNA
gttgcatttagtgatctttt

SEQ ID NO: 164182 - DNA, 20 bp, Homo sapiens
  source 1..20: mol_type = genomic DNA
ttgcatttagtgatcttttg

SEQ ID NO: 164183 - DNA, 20 bp, Homo sapiens
  source 1..20: mol_type = genomic DNA
tgcatttagtgatcttttgc

SEQ ID NO: 164184 - DNA, 20 bp, Homo sapiens
  source 1..20: mol_type = genomic DNA
gcatttagtgatcttttgcc

SEQ ID NO: 164185 - DNA, 20 bp, Homo sapiens
  source 1..20: mol_type = genomic DNA
catttagtgatcttttgcca

SEQ ID NO: 164186 - DNA, 20 bp, Homo sapiens
  source 1..20: mol_type = genomic DNA
atttagtgatcttttgccat

SEQ ID NO: 164187 - DNA, 20 bp, Homo sapiens
  source 1..20: mol_type = genomic DNA
tttagtgatcttttgccata

SEQ ID NO: 164188 - DNA, 20 bp, Homo sapiens
  source 1..20: mol_type = genomic DNA
ttagtgatcttttgccatat

SEQ ID NO: 164189 - DNA, 20 bp, Homo sapiens
  source 1..20: mol_type = genomic DNA
tagtgatcttttgccatatt

SEQ ID NO: 164190 - DNA, 20 bp, Homo sapiens
  source 1..20: mol_type = genomic DNA
agtgatcttttgccatattt

SEQ ID NO: 164191 - DNA, 20 bp, Homo sapiens
  source 1..20: mol_type = genomic DNA
gtgatcttttgccatatttg

SEQ ID NO: 164192 - DNA, 20 bp, Homo sapiens
  source 1..20: mol_type = genomic DNA
tgatcttttgccatatttga

SEQ ID NO: 164193 - DNA, 20 bp, Homo sapiens
  source 1..20: mol_type = genomic DNA
gatcttttgccatatttgag

SEQ ID NO: 164194 - DNA, 20 bp, Homo sapiens
  source 1..20: mol_type = genomic DNA
atcttttgccatatttgagt

SEQ ID NO: 164195 - DNA, 20 bp, Homo sapiens
  source 1..20: mol_type = genomic DNA
tcttttgccatatttgagta

SEQ ID NO: 164196 - DNA, 20 bp, Homo sapiens
  source 1..20: mol_type = genomic DNA
cttttgccatatttgagtaa

SEQ ID NO: 164197 - DNA, 20 bp, Homo sapiens
  source 1..20: mol_type = genomic DNA
ttttgccatatttgagtaat

SEQ ID NO: 164198 - DNA, 20 bp, Homo sapiens
  source 1..20: mol_type = genomic DNA
tttgccatatttgagtaata

SEQ ID NO: 164199 - DNA, 20 bp, Homo sapiens
  source 1..20: mol_type = genomic DNA
ttgccatatttgagtaataa

SEQ ID NO: 164200 - DNA, 20 bp, Homo sapiens
  source 1..20: mol_type = genomic DNA
tgccatatttgagtaataat

SEQ ID NO: 164201 - DNA, 20 bp, Homo sapiens
  source 1..20: mol_type = genomic DNA
gccatatttgagtaataatc

SEQ ID NO: 164202 - DNA, 20 bp, Homo sapiens
  source 1..20: mol_type = genomic DNA
ccatatttgagtaataatct

SEQ ID NO: 164203 - DNA, 20 bp, Homo sapiens
  source 1..20: mol_type = genomic DNA
catatttgagtaataatctg

SEQ ID NO: 164204 - DNA, 20 bp, Homo sapiens
  source 1..20: mol_type = genomic DNA
atatttgagtaataatctga

SEQ ID NO: 164205 - DNA, 20 bp, Homo sapiens
  source 1..20: mol_type = genomic DNA
tatttgagtaataatctgat

SEQ ID NO: 164206 - DNA, 20 bp, Homo sapiens
  source 1..20: mol_type = genomic DNA
atttgagtaataatctgatt

SEQ ID NO: 164207 - DNA, 20 bp, Homo sapiens
  source 1..20: mol_type = genomic DNA
tttgagtaataatctgattt

SEQ ID NO: 164208 - DNA, 20 bp, Homo sapiens
  source 1..20: mol_type = genomic DNA
ttgagtaataatctgatttt

SEQ ID NO: 164209 - DNA, 20 bp, Homo sapiens
  source 1..20: mol_type = genomic DNA
tgagtaataatctgattttt

SEQ ID NO: 164210 - DNA, 20 bp, Homo sapiens
  source 1..20: mol_type = genomic DNA
gagtaataatctgatttttt

SEQ ID NO: 164211 - DNA, 20 bp, Homo sapiens
  source 1..20: mol_type = genomic DNA
agtaataatctgattttttt

SEQ ID NO: 164212 - DNA, 20 bp, Homo sapiens
  source 1..20: mol_type = genomic DNA
gtaataatctgatttttttg

SEQ ID NO: 164213 - DNA, 20 bp, Homo sapiens
  source 1..20: mol_type = genomic DNA
taataatctgatttttttgt

SEQ ID NO: 164214 - DNA, 20 bp, Homo sapiens
  source 1..20: mol_type = genomic DNA
aataatctgatttttttgtt

SEQ ID NO: 164215 - DNA, 20 bp, Homo sapiens
  source 1..20: mol_type = genomic DNA
ataatctgatttttttgttt

SEQ ID NO: 164216 - DNA, 20 bp, Homo sapiens
  source 1..20: mol_type = genomic DNA
taatctgatttttttgttta

SEQ ID NO: 164217 - DNA, 20 bp, Homo sapiens
  source 1..20: mol_type = genomic DNA
aatctgatttttttgtttat

SEQ ID NO: 164218 - DNA, 20 bp, Homo sapiens
  source 1..20: mol_type = genomic DNA
atctgatttttttgtttata

SEQ ID NO: 164219 - DNA, 20 bp, Homo sapiens
  source 1..20: mol_type = genomic DNA
tctgatttttttgtttatag

SEQ ID NO: 164220 - DNA, 20 bp, Homo sapiens
  source 1..20: mol_type = genomic DNA
ctgatttttttgtttataga

SEQ ID NO: 164221 - DNA, 20 bp, Homo sapiens
  source 1..20: mol_type = genomic DNA
tgatttttttgtttatagat

SEQ ID NO: 164222 - DNA, 20 bp, Homo sapiens
  source 1..20: mol_type = genomic DNA
gatttttttgtttatagatt

SEQ ID NO: 164223 - DNA, 20 bp, Homo sapiens
  source 1..20: mol_type = genomic DNA
atttttttgtttatagattt

SEQ ID NO: 164224 - DNA, 20 bp, Homo sapiens
  source 1..20: mol_type = genomic DNA
tttttttgtttatagatttc

SEQ ID NO: 164225 - DNA, 20 bp, Homo sapiens
  source 1..20: mol_type = genomic DNA
ttttttgtttatagatttct

SEQ ID NO: 164226 - DNA, 20 bp, Homo sapiens
  source 1..20: mol_type = genomic DNA
tttttgtttatagatttctt

SEQ ID NO: 164227 - DNA, 20 bp, Homo sapiens
  source 1..20: mol_type = genomic DNA
ttttgtttatagatttcttc

SEQ ID NO: 164228 - DNA, 20 bp, Homo sapiens
  source 1..20: mol_type = genomic DNA
tttgtttatagatttcttct

SEQ ID NO: 164229 - DNA, 20 bp, Homo sapiens
  source 1..20: mol_type = genomic DNA
ttgtttatagatttcttctt

SEQ ID NO: 164230 - DNA, 20 bp, Homo sapiens
  source 1..20: mol_type = genomic DNA
tgtttatagatttcttctta

SEQ ID NO: 164231 - DNA, 20 bp, Homo sapiens
  source 1..20: mol_type = genomic DNA
gtttatagatttcttcttaa

SEQ ID NO: 164232 - DNA, 20 bp, Homo sapiens
  source 1..20: mol_type = genomic DNA
tttatagatttcttcttaaa

SEQ ID NO: 164233 - DNA, 20 bp, Homo sapiens
  source 1..20: mol_type = genomic DNA
ttatagatttcttcttaaat

SEQ ID NO: 164234 - DNA, 20 bp, Homo sapiens
  source 1..20: mol_type = genomic DNA
tatagatttcttcttaaatt

SEQ ID NO: 164235 - DNA, 20 bp, Homo sapiens
  source 1..20: mol_type = genomic DNA
atagatttcttcttaaatta

SEQ ID NO: 164236 - DNA, 20 bp, Homo sapiens
  source 1..20: mol_type = genomic DNA
tagatttcttcttaaattaa

SEQ ID NO: 164237 - DNA, 20 bp, Homo sapiens
  source 1..20: mol_type = genomic DNA
agatttcttcttaaattaac

SEQ ID NO: 164238 - DNA, 20 bp, Homo sapiens
  source 1..20: mol_type = genomic DNA
gatttcttcttaaattaact

SEQ ID NO: 164239 - DNA, 20 bp, Homo sapiens
  source 1..20: mol_type = genomic DNA
atttcttcttaaattaactt

SEQ ID NO: 164240 - DNA, 20 bp, Homo sapiens
  source 1..20: mol_type = genomic DNA
tttcttcttaaattaacttt

SEQ ID NO: 164241 - DNA, 20 bp, Homo sapiens
  source 1..20: mol_type = genomic DNA
ttcttcttaaattaacttta

SEQ ID NO: 164242 - DNA, 20 bp, Homo sapiens
  source 1..20: mol_type = genomic DNA
tcttcttaaattaactttat

SEQ ID NO: 164243 - DNA, 20 bp, Homo sapiens
  source 1..20: mol_type = genomic DNA
cttcttaaattaactttatt

SEQ ID NO: 164244 - DNA, 20 bp, Homo sapiens
  source 1..20: mol_type = genomic DNA
ttcttaaattaactttattc

SEQ ID NO: 164245 - DNA, 20 bp, Homo sapiens
  source 1..20: mol_type = genomic DNA
tcttaaattaactttattca

SEQ ID NO: 164246 - DNA, 20 bp, Homo sapiens
  source 1..20: mol_type = genomic DNA
cttaaattaactttattcat

SEQ ID NO: 164247 - DNA, 20 bp, Homo sapiens
  source 1..20: mol_type = genomic DNA
ttaaattaactttattcatc

SEQ ID NO: 164248 - DNA, 20 bp, Homo sapiens
  source 1..20: mol_type = genomic DNA
taaattaactttattcatct

SEQ ID NO: 164249 - DNA, 20 bp, Homo sapiens
  source 1..20: mol_type = genomic DNA
aaattaactttattcatctt

SEQ ID NO: 164250 - DNA, 20 bp, Homo sapiens
  source 1..20: mol_type = genomic DNA
aattaactttattcatcttg

SEQ ID NO: 164251 - DNA, 20 bp, Homo sapiens
  source 1..20: mol_type = genomic DNA
attaactttattcatcttgc

SEQ ID NO: 164252 - DNA, 20 bp, Homo sapiens
  source 1..20: mol_type = genomic DNA
ttaactttattcatcttgct

SEQ ID NO: 164253 - DNA, 20 bp, Homo sapiens
  source 1..20: mol_type = genomic DNA
taactttattcatcttgcta

SEQ ID NO: 164254 - DNA, 20 bp, Homo sapiens
  source 1..20: mol_type = genomic DNA
aactttattcatcttgctaa

SEQ ID NO: 164255 - DNA, 20 bp, Homo sapiens
  source 1..20: mol_type = genomic DNA
actttattcatcttgctaat

SEQ ID NO: 164256 - DNA, 20 bp, Homo sapiens
  source 1..20: mol_type = genomic DNA
ctttattcatcttgctaatt

SEQ ID NO: 164257 - DNA, 20 bp, Homo sapiens
  source 1..20: mol_type = genomic DNA
tttattcatcttgctaattt

SEQ ID NO: 164258 - DNA, 20 bp, Homo sapiens
  source 1..20: mol_type = genomic DNA
ttattcatcttgctaattta

SEQ ID NO: 164259 - DNA, 20 bp, Homo sapiens
  source 1..20: mol_type = genomic DNA
tattcatcttgctaatttag

SEQ ID NO: 164260 - DNA, 20 bp, Homo sapiens
  source 1..20: mol_type = genomic DNA
attcatcttgctaatttagt

SEQ ID NO: 164261 - DNA, 20 bp, Homo sapiens
  source 1..20: mol_type = genomic DNA
ttcatcttgctaatttagtt

SEQ ID NO: 164262 - DNA, 20 bp, Homo sapiens
  source 1..20: mol_type = genomic DNA
tcatcttgctaatttagttt

SEQ ID NO: 164263 - DNA, 20 bp, Homo sapiens
  source 1..20: mol_type = genomic DNA
catcttgctaatttagtttc

SEQ ID NO: 164264 - DNA, 20 bp, Homo sapiens
  source 1..20: mol_type = genomic DNA
atcttgctaatttagtttca

SEQ ID NO: 164265 - DNA, 20 bp, Homo sapiens
  source 1..20: mol_type = genomic DNA
tcttgctaatttagtttcaa

SEQ ID NO: 164266 - DNA, 20 bp, Homo sapiens
  source 1..20: mol_type = genomic DNA
cttgctaatttagtttcaaa

SEQ ID NO: 164267 - DNA, 20 bp, Homo sapiens
  source 1..20: mol_type = genomic DNA
ttgctaatttagtttcaaat

SEQ ID NO: 164268 - DNA, 20 bp, Homo sapiens
  source 1..20: mol_type = genomic DNA
tgctaatttagtttcaaata

SEQ ID NO: 164269 - DNA, 20 bp, Homo sapiens
  source 1..20: mol_type = genomic DNA
gctaatttagtttcaaatag

SEQ ID NO: 164270 - DNA, 20 bp, Homo sapiens
  source 1..20: mol_type = genomic DNA
ctaatttagtttcaaatagt

SEQ ID NO: 164271 - DNA, 20 bp, Homo sapiens
  source 1..20: mol_type = genomic DNA
taatttagtttcaaatagtg

SEQ ID NO: 164272 - DNA, 20 bp, Homo sapiens
  source 1..20: mol_type = genomic DNA
aatttagtttcaaatagtga

SEQ ID NO: 164273 - DNA, 20 bp, Homo sapiens
  source 1..20: mol_type = genomic DNA
atttagtttcaaatagtgat

SEQ ID NO: 164274 - DNA, 20 bp, Homo sapiens
  source 1..20: mol_type = genomic DNA
tttagtttcaaatagtgatt

SEQ ID NO: 164275 - DNA, 20 bp, Homo sapiens
  source 1..20: mol_type = genomic DNA
ttagtttcaaatagtgattt

SEQ ID NO: 164276 - DNA, 20 bp, Homo sapiens
  source 1..20: mol_type = genomic DNA
tagtttcaaatagtgatttg

SEQ ID NO: 164277 - DNA, 20 bp, Homo sapiens
  source 1..20: mol_type = genomic DNA
agtttcaaatagtgatttgt

SEQ ID NO: 164278 - DNA, 20 bp, Homo sapiens
  source 1..20: mol_type = genomic DNA
gtttcaaatagtgatttgta

SEQ ID NO: 164279 - DNA, 20 bp, Homo sapiens
  source 1..20: mol_type = genomic DNA
tttcaaatagtgatttgtaa

SEQ ID NO: 164280 - DNA, 20 bp, Homo sapiens
  source 1..20: mol_type = genomic DNA
ttcaaatagtgatttgtaat

SEQ ID NO: 164281 - DNA, 20 bp, Homo sapiens
  source 1..20: mol_type = genomic DNA
tcaaatagtgatttgtaatg

SEQ ID NO: 164282 - DNA, 20 bp, Homo sapiens
  source 1..20: mol_type = genomic DNA
caaatagtgatttgtaatga

SEQ ID NO: 164283 - DNA, 20 bp, Homo sapiens
  source 1..20: mol_type = genomic DNA
aaatagtgatttgtaatgat

SEQ ID NO: 164284 - DNA, 20 bp, Homo sapiens
  source 1..20: mol_type = genomic DNA
aatagtgatttgtaatgatc

SEQ ID NO: 164285 - DNA, 20 bp, Homo sapiens
  source 1..20: mol_type = genomic DNA
atagtgatttgtaatgatca

SEQ ID NO: 164286 - DNA, 20 bp, Homo sapiens
  source 1..20: mol_type = genomic DNA
tagtgatttgtaatgatcag

SEQ ID NO: 164287 - DNA, 20 bp, Homo sapiens
  source 1..20: mol_type = genomic DNA
agtgatttgtaatgatcaga

SEQ ID NO: 164288 - DNA, 20 bp, Homo sapiens
  source 1..20: mol_type = genomic DNA
gtgatttgtaatgatcagat

SEQ ID NO: 164289 - DNA, 20 bp, Homo sapiens
  source 1..20: mol_type = genomic DNA
tgatttgtaatgatcagatt

SEQ ID NO: 164290 - DNA, 20 bp, Homo sapiens
  source 1..20: mol_type = genomic DNA
gatttgtaatgatcagattt

SEQ ID NO: 164291 - DNA, 20 bp, Homo sapiens
  source 1..20: mol_type = genomic DNA
atttgtaatgatcagatttg

SEQ ID NO: 164292 - DNA, 20 bp, Homo sapiens
  source 1..20: mol_type = genomic DNA
tttgtaatgatcagatttga

SEQ ID NO: 164293 - DNA, 20 bp, Homo sapiens
  source 1..20: mol_type = genomic DNA
ttgtaatgatcagatttgat

SEQ ID NO: 164294 - DNA, 20 bp, Homo sapiens
  source 1..20: mol_type = genomic DNA
tgtaatgatcagatttgatc

SEQ ID NO: 164295 - DNA, 20 bp, Homo sapiens
  source 1..20: mol_type = genomic DNA
gtaatgatcagatttgatcc

SEQ ID NO: 164296 - DNA, 20 bp, Homo sapiens
  source 1..20: mol_type = genomic DNA
taatgatcagatttgatcca

SEQ ID NO: 164297 - DNA, 20 bp, Homo sapiens
  source 1..20: mol_type = genomic DNA
aatgatcagatttgatccat

SEQ ID NO: 164298 - DNA, 20 bp, Homo sapiens
  source 1..20: mol_type = genomic DNA
atgatcagatttgatccatt

SEQ ID NO: 164299 - DNA, 20 bp, Homo sapiens
  source 1..20: mol_type = genomic DNA
tgatcagatttgatccattt

SEQ ID NO: 164300 - DNA, 20 bp, Homo sapiens
  source 1..20: mol_type = genomic DNA
gatcagatttgatccatttc

SEQ ID NO: 164301 - DNA, 20 bp, Homo sapiens
  source 1..20: mol_type = genomic DNA
atcagatttgatccatttct

SEQ ID NO: 164302 - DNA, 20 bp, Homo sapiens
  source 1..20: mol_type = genomic DNA
tcagatttgatccatttctg

SEQ ID NO: 164303 - DNA, 20 bp, Homo sapiens
  source 1..20: mol_type = genomic DNA
cagatttgatccatttctgt

SEQ ID NO: 164304 - DNA, 20 bp, Homo sapiens
  source 1..20: mol_type = genomic DNA
agatttgatccatttctgta

SEQ ID NO: 164305 - DNA, 20 bp, Homo sapiens
  source 1..20: mol_type = genomic DNA
gatttgatccatttctgtaa

SEQ ID NO: 164306 - DNA, 20 bp, Homo sapiens
  source 1..20: mol_type = genomic DNA
atttgatccatttctgtaat

SEQ ID NO: 164307 - DNA, 20 bp, Homo sapiens
  source 1..20: mol_type = genomic DNA
tttgatccatttctgtaatt

SEQ ID NO: 164308 - DNA, 20 bp, Homo sapiens
  source 1..20: mol_type = genomic DNA
ttgatccatttctgtaattg

SEQ ID NO: 164309 - DNA, 20 bp, Homo sapiens
  source 1..20: mol_type = genomic DNA
tgatccatttctgtaattgc

SEQ ID NO: 164310 - DNA, 20 bp, Homo sapiens
  source 1..20: mol_type = genomic DNA
gatccatttctgtaattgct

SEQ ID NO: 164311 - DNA, 20 bp, Homo sapiens
  source 1..20: mol_type = genomic DNA
atccatttctgtaattgctg

SEQ ID NO: 164312 - DNA, 20 bp, Homo sapiens
  source 1..20: mol_type = genomic DNA
tccatttctgtaattgctga

SEQ ID NO: 164313 - DNA, 20 bp, Homo sapiens
  source 1..20: mol_type = genomic DNA
ccatttctgtaattgctgaa

SEQ ID NO: 164314 - DNA, 20 bp, Homo sapiens
  source 1..20: mol_type = genomic DNA
catttctgtaattgctgaaa

SEQ ID NO: 164315 - DNA, 20 bp, Homo sapiens
  source 1..20: mol_type = genomic DNA
atttctgtaattgctgaaat

SEQ ID NO: 164316 - DNA, 20 bp, Homo sapiens
  source 1..20: mol_type = genomic DNA
tttctgtaattgctgaaatt

SEQ ID NO: 164317 - DNA, 20 bp, Homo sapiens
  source 1..20: mol_type = genomic DNA
ttctgtaattgctgaaattc

SEQ ID NO: 164318 - DNA, 20 bp, Homo sapiens
  source 1..20: mol_type = genomic DNA
tctgtaattgctgaaattcc

SEQ ID NO: 164319 - DNA, 20 bp, Homo sapiens
  source 1..20: mol_type = genomic DNA
ctgtaattgctgaaattccc

SEQ ID NO: 164320 - DNA, 20 bp, Homo sapiens
  source 1..20: mol_type = genomic DNA
tgtaattgctgaaattcccc

SEQ ID NO: 164321 - DNA, 20 bp, Homo sapiens
  source 1..20: mol_type = genomic DNA
gtaattgctgaaattccccc

SEQ ID NO: 164322 - DNA, 20 bp, Homo sapiens
  source 1..20: mol_type = genomic DNA
taattgctgaaattcccccg

SEQ ID NO: 164323 - DNA, 20 bp, Homo sapiens
  source 1..20: mol_type = genomic DNA
aattgctgaaattcccccga

SEQ ID NO: 164324 - DNA, 20 bp, Homo sapiens
  source 1..20: mol_type = genomic DNA
attgctgaaattcccccgag

SEQ ID NO: 164325 - DNA, 20 bp, Homo sapiens
  source 1..20: mol_type = genomic DNA
ttgctgaaattcccccgagt

SEQ ID NO: 164326 - DNA, 20 bp, Homo sapiens
  source 1..20: mol_type = genomic DNA
tgctgaaattcccccgagtt

SEQ ID NO: 164327 - DNA, 20 bp, Homo sapiens
  source 1..20: mol_type = genomic DNA
gctgaaattcccccgagttg

SEQ ID NO: 164328 - DNA, 20 bp, Homo sapiens
  source 1..20: mol_type = genomic DNA
ctgaaattcccccgagttgc

SEQ ID NO: 164329 - DNA, 20 bp, Homo sapiens
  source 1..20: mol_type = genomic DNA
tgaaattcccccgagttgct

SEQ ID NO: 164330 - DNA, 20 bp, Homo sapiens
  source 1..20: mol_type = genomic DNA
gaaattcccccgagttgctt

SEQ ID NO: 164331 - DNA, 20 bp, Homo sapiens
  source 1..20: mol_type = genomic DNA
aaattcccccgagttgcttt

SEQ ID NO: 164332 - DNA, 20 bp, Homo sapiens
  source 1..20: mol_type = genomic DNA
aattcccccgagttgctttt

SEQ ID NO: 164333 - DNA, 20 bp, Homo sapiens
  source 1..20: mol_type = genomic DNA
attcccccgagttgcttttt

SEQ ID NO: 164334 - DNA, 20 bp, Homo sapiens
  source 1..20: mol_type = genomic DNA
ttcccccgagttgctttttg

SEQ ID NO: 164335 - DNA, 20 bp, Homo sapiens
  source 1..20: mol_type = genomic DNA
tcccccgagttgctttttgg

SEQ ID NO: 164336 - DNA, 20 bp, Homo sapiens
  source 1..20: mol_type = genomic DNA
cccccgagttgctttttggc

SEQ ID NO: 164337 - DNA, 20 bp, Homo sapiens
  source 1..20: mol_type = genomic DNA
ccccgagttgctttttggct

SEQ ID NO: 164338 - DNA, 20 bp, Homo sapiens
  source 1..20: mol_type = genomic DNA
cccgagttgctttttggctt

SEQ ID NO: 164339 - DNA, 20 bp, Homo sapiens
  source 1..20: mol_type = genomic DNA
ccgagttgctttttggcttt

SEQ ID NO: 164340 - DNA, 20 bp, Homo sapiens
  source 1..20: mol_type = genomic DNA
cgagttgctttttggcttta

SEQ ID NO: 164341 - DNA, 20 bp, Homo sapiens
  source 1..20: mol_type = genomic DNA
gagttgctttttggctttac

SEQ ID NO: 164342 - DNA, 20 bp, Homo sapiens
  source 1..20: mol_type = genomic DNA
agttgctttttggctttacc

SEQ ID NO: 164343 - DNA, 20 bp, Homo sapiens
  source 1..20: mol_type = genomic DNA
gttgctttttggctttaccg

SEQ ID NO: 164344 - DNA, 20 bp, Homo sapiens
  source 1..20: mol_type = genomic DNA
ttgctttttggctttaccgc

SEQ ID NO: 164345 - DNA, 20 bp, Homo sapiens
  source 1..20: mol_type = genomic DNA
tgctttttggctttaccgcc

SEQ ID NO: 164346 - DNA, 20 bp, Homo sapiens
  source 1..20: mol_type = genomic DNA
gctttttggctttaccgcct

SEQ ID NO: 164347 - DNA, 20 bp, Homo sapiens
  source 1..20: mol_type = genomic DNA
ctttttggctttaccgcctc

SEQ ID NO: 164348 - DNA, 20 bp, Homo sapiens
  source 1..20: mol_type = genomic DNA
tttttggctttaccgcctct

SEQ ID NO: 164349 - DNA, 20 bp, Homo sapiens
  source 1..20: mol_type = genomic DNA
ttttggctttaccgcctctg

SEQ ID NO: 164350 - DNA, 20 bp, Homo sapiens
  source 1..20: mol_type = genomic DNA
tttggctttaccgcctctgg

SEQ ID NO: 164351 - DNA, 20 bp, Homo sapiens
  source 1..20: mol_type = genomic DNA
ttggctttaccgcctctggt

SEQ ID NO: 164352 - DNA, 20 bp, Homo sapiens
  source 1..20: mol_type = genomic DNA
tggctttaccgcctctggtc

SEQ ID NO: 164353 - DNA, 20 bp, Homo sapiens
  source 1..20: mol_type = genomic DNA
ggctttaccgcctctggtct

SEQ ID NO: 164354 - DNA, 20 bp, Homo sapiens
  source 1..20: mol_type = genomic DNA
gctttaccgcctctggtctg

SEQ ID NO: 164355 - DNA, 20 bp, Homo sapiens
  source 1..20: mol_type = genomic DNA
ctttaccgcctctggtctgg

SEQ ID NO: 164356 - DNA, 20 bp, Homo sapiens
  source 1..20: mol_type = genomic DNA
tttaccgcctctggtctggg

SEQ ID NO: 164357 - DNA, 20 bp, Homo sapiens
  source 1..20: mol_type = genomic DNA
ttaccgcctctggtctggga

SEQ ID NO: 164358 - DNA, 20 bp, Homo sapiens
  source 1..20: mol_type = genomic DNA
taccgcctctggtctgggag

SEQ ID NO: 164359 - DNA, 20 bp, Homo sapiens
  source 1..20: mol_type = genomic DNA
accgcctctggtctgggagg

SEQ ID NO: 164360 - DNA, 20 bp, Homo sapiens
  source 1..20: mol_type = genomic DNA
ccgcctctggtctgggaggt

SEQ ID NO: 164361 - DNA, 20 bp, Homo sapiens
  source 1..20: mol_type = genomic DNA
cgcctctggtctgggaggtg

SEQ ID NO: 164362 - DNA, 20 bp, Homo sapiens
  source 1..20: mol_type = genomic DNA
gcctctggtctgggaggtga

SEQ ID NO: 164363 - DNA, 20 bp, Homo sapiens
  source 1..20: mol_type = genomic DNA
cctctggtctgggaggtgat

SEQ ID NO: 164364 - DNA, 20 bp, Homo sapiens
  source 1..20: mol_type = genomic DNA
ctctggtctgggaggtgatt

SEQ ID NO: 164365 - DNA, 20 bp, Homo sapiens
  source 1..20: mol_type = genomic DNA
tctggtctgggaggtgattg

SEQ ID NO: 164366 - DNA, 20 bp, Homo sapiens
  source 1..20: mol_type = genomic DNA
ctggtctgggaggtgattgc

SEQ ID NO: 164367 - DNA, 20 bp, Homo sapiens
  source 1..20: mol_type = genomic DNA
tggtctgggaggtgattgct

SEQ ID NO: 164368 - DNA, 20 bp, Homo sapiens
  source 1..20: mol_type = genomic DNA
ggtctgggaggtgattgctc

SEQ ID NO: 164369 - DNA, 20 bp, Homo sapiens
  source 1..20: mol_type = genomic DNA
gtctgggaggtgattgctct

SEQ ID NO: 164370 - DNA, 20 bp, Homo sapiens
  source 1..20: mol_type = genomic DNA
tctgggaggtgattgctctg

SEQ ID NO: 164371 - DNA, 20 bp, Homo sapiens
  source 1..20: mol_type = genomic DNA
ctgggaggtgattgctctgc

SEQ ID NO: 164372 - DNA, 20 bp, Homo sapiens
  source 1..20: mol_type = genomic DNA
tgggaggtgattgctctgct

SEQ ID NO: 164373 - DNA, 20 bp, Homo sapiens
  source 1..20: mol_type = genomic DNA
gggaggtgattgctctgctg

SEQ ID NO: 164374 - DNA, 20 bp, Homo sapiens
  source 1..20: mol_type = genomic DNA
ggaggtgattgctctgctgc

SEQ ID NO: 164375 - DNA, 20 bp, Homo sapiens
  source 1..20: mol_type = genomic DNA
gaggtgattgctctgctgct

SEQ ID NO: 164376 - DNA, 20 bp, Homo sapiens
  source 1..20: mol_type = genomic DNA
aggtgattgctctgctgctt

SEQ ID NO: 164377 - DNA, 20 bp, Homo sapiens
  source 1..20: mol_type = genomic DNA
ggtgattgctctgctgcttc

SEQ ID NO: 164378 - DNA, 20 bp, Homo sapiens
  source 1..20: mol_type = genomic DNA
gtgattgctctgctgcttcc

SEQ ID NO: 164379 - DNA, 20 bp, Homo sapiens
  source 1..20: mol_type = genomic DNA
tgattgctctgctgcttcct

SEQ ID NO: 164380 - DNA, 20 bp, Homo sapiens
  source 1..20: mol_type = genomic DNA
gattgctctgctgcttcctg

SEQ ID NO: 164381 - DNA, 20 bp, Homo sapiens
  source 1..20: mol_type = genomic DNA
attgctctgctgcttcctgt

SEQ ID NO: 164382 - DNA, 20 bp, Homo sapiens
  source 1..20: mol_type = genomic DNA
ttgctctgctgcttcctgta

SEQ ID NO: 164383 - DNA, 20 bp, Homo sapiens
  source 1..20: mol_type = genomic DNA
tgctctgctgcttcctgtaa

SEQ ID NO: 164384 - DNA, 20 bp, Homo sapiens
  source 1..20: mol_type = genomic DNA
gctctgctgcttcctgtaac

SEQ ID NO: 164385 - DNA, 20 bp, Homo sapiens
  source 1..20: mol_type = genomic DNA
ctctgctgcttcctgtaact

SEQ ID NO: 164386 - DNA, 20 bp, Homo sapiens
  source 1..20: mol_type = genomic DNA
tctgctgcttcctgtaactt

SEQ ID NO: 164387 - DNA, 20 bp, Homo sapiens
  source 1..20: mol_type = genomic DNA
ctgctgcttcctgtaacttg

SEQ ID NO: 164388 - DNA, 20 bp, Homo sapiens
  source 1..20: mol_type = genomic DNA
tgctgcttcctgtaacttgc

SEQ ID NO: 164389 - DNA, 20 bp, Homo sapiens
  source 1..20: mol_type = genomic DNA
gctgcttcctgtaacttgcc

SEQ ID NO: 164390 - DNA, 20 bp, Homo sapiens
  source 1..20: mol_type = genomic DNA
ctgcttcctgtaacttgcct

SEQ ID NO: 164391 - DNA, 20 bp, Homo sapiens
  source 1..20: mol_type = genomic DNA
tgcttcctgtaacttgcctg

SEQ ID NO: 164392 - DNA, 20 bp, Homo sapiens
  source 1..20: mol_type = genomic DNA
gcttcctgtaacttgcctgc

SEQ ID NO: 164393 - DNA, 20 bp, Homo sapiens
  source 1..20: mol_type = genomic DNA
cttcctgtaacttgcctgcc

SEQ ID NO: 164394 - DNA, 20 bp, Homo sapiens
  source 1..20: mol_type = genomic DNA
ttcctgtaacttgcctgcct

SEQ ID NO: 164395 - DNA, 20 bp, Homo sapiens
  source 1..20: mol_type = genomic DNA
tcctgtaacttgcctgcctt

SEQ ID NO: 164396 - DNA, 20 bp, Homo sapiens
  source 1..20: mol_type = genomic DNA
cctgtaacttgcctgccttt

SEQ ID NO: 164397 - DNA, 20 bp, Homo sapiens
  source 1..20: mol_type = genomic DNA
ctgtaacttgcctgcctttc

SEQ ID NO: 164398 - DNA, 20 bp, Homo sapiens
  source 1..20: mol_type = genomic DNA
tgtaacttgcctgcctttct

SEQ ID NO: 164399 - DNA, 20 bp, Homo sapiens
  source 1..20: mol_type = genomic DNA
gtaacttgcctgcctttctc

SEQ ID NO: 164400 - DNA, 20 bp, Homo sapiens
  source 1..20: mol_type = genomic DNA
taacttgcctgcctttctcc

SEQ ID NO: 164401 - DNA, 20 bp, Homo sapiens
  source 1..20: mol_type = genomic DNA
aacttgcctgcctttctccc

SEQ ID NO: 164402 - DNA, 20 bp, Homo sapiens
  source 1..20: mol_type = genomic DNA
acttgcctgcctttctccct

SEQ ID NO: 164403 - DNA, 20 bp, Homo sapiens
  source 1..20: mol_type = genomic DNA
cttgcctgcctttctccctg

SEQ ID NO: 164404 - DNA, 20 bp, Homo sapiens
  source 1..20: mol_type = genomic DNA
ttgcctgcctttctccctgt

SEQ ID NO: 164405 - DNA, 20 bp, Homo sapiens
  source 1..20: mol_type = genomic DNA
tgcctgcctttctccctgtg

SEQ ID NO: 164406 - DNA, 20 bp, Homo sapiens
  source 1..20: mol_type = genomic DNA
gcctgcctttctccctgtgt

SEQ ID NO: 164407 - DNA, 20 bp, Homo sapiens
  source 1..20: mol_type = genomic DNA
cctgcctttctccctgtgtg

SEQ ID NO: 164408 - DNA, 20 bp, Homo sapiens
  source 1..20: mol_type = genomic DNA
ctgcctttctccctgtgtgg

SEQ ID NO: 164409 - DNA, 20 bp, Homo sapiens
  source 1..20: mol_type = genomic DNA
tgcctttctccctgtgtggg

SEQ ID NO: 164410 - DNA, 20 bp, Homo sapiens
  source 1..20: mol_type = genomic DNA
gcctttctccctgtgtggga

SEQ ID NO: 164411 - DNA, 20 bp, Homo sapiens
  source 1..20: mol_type = genomic DNA
cctttctccctgtgtgggac

SEQ ID NO: 164412 - DNA, 20 bp, Homo sapiens
  source 1..20: mol_type = genomic DNA
ctttctccctgtgtgggact

SEQ ID NO: 164413 - DNA, 20 bp, Homo sapiens
  source 1..20: mol_type = genomic DNA
tttctccctgtgtgggactc

SEQ ID NO: 164414 - DNA, 20 bp, Homo sapiens
  source 1..20: mol_type = genomic DNA
ttctccctgtgtgggactcc

SEQ ID NO: 164415 - DNA, 20 bp, Homo sapiens
  source 1..20: mol_type = genomic DNA
tctccctgtgtgggactcct

SEQ ID NO: 164416 - DNA, 20 bp, Homo sapiens
  source 1..20: mol_type = genomic DNA
ctccctgtgtgggactcctg

SEQ ID NO: 164417 - DNA, 20 bp, Homo sapiens
  source 1..20: mol_type = genomic DNA
tccctgtgtgggactcctgc

SEQ ID NO: 164418 - DNA, 20 bp, Homo sapiens
  source 1..20: mol_type = genomic DNA
ccctgtgtgggactcctgcg

SEQ ID NO: 164419 - DNA, 20 bp, Homo sapiens
  source 1..20: mol_type = genomic DNA
cctgtgtgggactcctgcgg

SEQ ID NO: 164420 - DNA, 20 bp, Homo sapiens
  source 1..20: mol_type = genomic DNA
ctgtgtgggactcctgcggg

SEQ ID NO: 164421 - DNA, 20 bp, Homo sapiens
  source 1..20: mol_type = genomic DNA
tgtgtgggactcctgcgggt

SEQ ID NO: 164422 - DNA, 20 bp, Homo sapiens
  source 1..20: mol_type = genomic DNA
gtgtgggactcctgcgggtg

SEQ ID NO: 164423 - DNA, 20 bp, Homo sapiens
  source 1..20: mol_type = genomic DNA
tgtgggactcctgcgggtga

SEQ ID NO: 164424 - DNA, 20 bp, Homo sapiens
  source 1..20: mol_type = genomic DNA
gtgggactcctgcgggtgag

SEQ ID NO: 164425 - DNA, 20 bp, Homo sapiens
  source 1..20: mol_type = genomic DNA
tgggactcctgcgggtgaga

SEQ ID NO: 164426 - DNA, 20 bp, Homo sapiens
  source 1..20: mol_type = genomic DNA
gggactcctgcgggtgagag

SEQ ID NO: 164427 - DNA, 20 bp, Homo sapiens
  source 1..20: mol_type = genomic DNA
ggactcctgcgggtgagagc

SEQ ID NO: 164428 - DNA, 20 bp, Homo sapiens
  source 1..20: mol_type = genomic DNA
gactcctgcgggtgagagcg

SEQ ID NO: 164429 - DNA, 20 bp, Homo sapiens
  source 1..20: mol_type = genomic DNA
actcctgcgggtgagagcgt

SEQ ID NO: 164430 - DNA, 20 bp, Homo sapiens
  source 1..20: mol_type = genomic DNA
ctcctgcgggtgagagcgtg

SEQ ID NO: 164431 - DNA, 20 bp, Homo sapiens
  source 1..20: mol_type = genomic DNA
tcctgcgggtgagagcgtgg

SEQ ID NO: 164432 - DNA, 20 bp, Homo sapiens
  source 1..20: mol_type = genomic DNA
cctgcgggtgagagcgtggc

SEQ ID NO: 164433 - DNA, 20 bp, Homo sapiens
  source 1..20: mol_type = genomic DNA
ctgcgggtgagagcgtggct

SEQ ID NO: 164434 - DNA, 20 bp, Homo sapiens
  source 1..20: mol_type = genomic DNA
tgcgggtgagagcgtggctg

SEQ ID NO: 164435 - DNA, 20 bp, Homo sapiens
  source 1..20: mol_type = genomic DNA
gcgggtgagagcgtggctga

SEQ ID NO: 164436 - DNA, 20 bp, Homo sapiens
  source 1..20: mol_type = genomic DNA
cgggtgagagcgtggctgaa

SEQ ID NO: 164437 - DNA, 20 bp, Homo sapiens
  source 1..20: mol_type = genomic DNA
gggtgagagcgtggctgaag

SEQ ID NO: 164438 - DNA, 20 bp, Homo sapiens
  source 1..20: mol_type = genomic DNA
ggtgagagcgtggctgaaga

SEQ ID NO: 164439 - DNA, 20 bp, Homo sapiens
  source 1..20: mol_type = genomic DNA
gtgagagcgtggctgaagac

SEQ ID NO: 164440 - DNA, 20 bp, Homo sapiens
  source 1..20: mol_type = genomic DNA
tgagagcgtggctgaagaca

SEQ ID NO: 164441 - DNA, 20 bp, Homo sapiens
  source 1..20: mol_type = genomic DNA
gagagcgtggctgaagacag

SEQ ID NO: 164442 - DNA, 20 bp, Homo sapiens
  source 1..20: mol_type = genomic DNA
agagcgtggctgaagacagc

SEQ ID NO: 164443 - DNA, 20 bp, Homo sapiens
  source 1..20: mol_type = genomic DNA
gagcgtggctgaagacagcc

SEQ ID NO: 164444 - DNA, 20 bp, Homo sapiens
  source 1..20: mol_type = genomic DNA
agcgtggctgaagacagccg

SEQ ID NO: 164445 - DNA, 20 bp, Homo sapiens
  source 1..20: mol_type = genomic DNA
gcgtggctgaagacagccgt

SEQ ID NO: 164446 - DNA, 20 bp, Homo sapiens
  source 1..20: mol_type = genomic DNA
cgtggctgaagacagccgtg

SEQ ID NO: 164447 - DNA, 20 bp, Homo sapiens
  source 1..20: mol_type = genomic DNA
gtggctgaagacagccgtgt

SEQ ID NO: 164448 - DNA, 20 bp, Homo sapiens
  source 1..20: mol_type = genomic DNA
tggctgaagacagccgtgtt

SEQ ID NO: 164449 - DNA, 20 bp, Homo sapiens
  source 1..20: mol_type = genomic DNA
ggctgaagacagccgtgtta

SEQ ID NO: 164450 - DNA, 20 bp, Homo sapiens
  source 1..20: mol_type = genomic DNA
gctgaagacagccgtgttat

SEQ ID NO: 164451 - DNA, 20 bp, Homo sapiens
  source 1..20: mol_type = genomic DNA
ctgaagacagccgtgttatg

SEQ ID NO: 164452 - DNA, 20 bp, Homo sapiens
  source 1..20: mol_type = genomic DNA
tgaagacagccgtgttatga

SEQ ID NO: 164453 - DNA, 20 bp, Homo sapiens
  source 1..20: mol_type = genomic DNA
gaagacagccgtgttatgaa

SEQ ID NO: 164454 - DNA, 20 bp, Homo sapiens
  source 1..20: mol_type = genomic DNA
aagacagccgtgttatgaaa

SEQ ID NO: 164455 - DNA, 20 bp, Homo sapiens
  source 1..20: mol_type = genomic DNA
agacagccgtgttatgaaag

SEQ ID NO: 164456 - DNA, 20 bp, Homo sapiens
  source 1..20: mol_type = genomic DNA
gacagccgtgttatgaaagg

SEQ ID NO: 164457 - DNA, 20 bp, Homo sapiens
  source 1..20: mol_type = genomic DNA
acagccgtgttatgaaaggg

SEQ ID NO: 164458 - DNA, 20 bp, Homo sapiens
  source 1..20: mol_type = genomic DNA
cagccgtgttatgaaagggc

SEQ ID NO: 164459 - DNA, 20 bp, Homo sapiens
  source 1..20: mol_type = genomic DNA
agccgtgttatgaaagggcc

SEQ ID NO: 164460 - DNA, 20 bp, Homo sapiens
  source 1..20: mol_type = genomic DNA
gccgtgttatgaaagggcct

SEQ ID NO: 164461 - DNA, 20 bp, Homo sapiens
  source 1..20: mol_type = genomic DNA
ccgtgttatgaaagggcctc

SEQ ID NO: 164462 - DNA, 20 bp, Homo sapiens
  source 1..20: mol_type = genomic DNA
cgtgttatgaaagggcctcc

SEQ ID NO: 164463 - DNA, 20 bp, Homo sapiens
  source 1..20: mol_type = genomic DNA
gtgttatgaaagggcctcct

SEQ ID NO: 164464 - DNA, 20 bp, Homo sapiens
  source 1..20: mol_type = genomic DNA
tgttatgaaagggcctcctg

SEQ ID NO: 164465 - DNA, 20 bp, Homo sapiens
  source 1..20: mol_type = genomic DNA
gttatgaaagggcctcctgt

SEQ ID NO: 164466 - DNA, 20 bp, Homo sapiens
  source 1..20: mol_type = genomic DNA
ttatgaaagggcctcctgtg

SEQ ID NO: 164467 - DNA, 20 bp, Homo sapiens
  source 1..20: mol_type = genomic DNA
tatgaaagggcctcctgtgc

SEQ ID NO: 164468 - DNA, 20 bp, Homo sapiens
  source 1..20: mol_type = genomic DNA
atgaaagggcctcctgtgct

SEQ ID NO: 164469 - DNA, 20 bp, Homo sapiens
  source 1..20: mol_type = genomic DNA
tgaaagggcctcctgtgctg

SEQ ID NO: 164470 - DNA, 20 bp, Homo sapiens
  source 1..20: mol_type = genomic DNA
gaaagggcctcctgtgctgt

SEQ ID NO: 164471 - DNA, 20 bp, Homo sapiens
  source 1..20: mol_type = genomic DNA
aaagggcctcctgtgctgtc

SEQ ID NO: 164472 - DNA, 20 bp, Homo sapiens
  source 1..20: mol_type = genomic DNA
aagggcctcctgtgctgtcg

SEQ ID NO: 164473 - DNA, 20 bp, Homo sapiens
  source 1..20: mol_type = genomic DNA
agggcctcctgtgctgtcga

SEQ ID NO: 164474 - DNA, 20 bp, Homo sapiens
  source 1..20: mol_type = genomic DNA
gggcctcctgtgctgtcgag

SEQ ID NO: 164475 - DNA, 20 bp, Homo sapiens
  source 1..20: mol_type = genomic DNA
ggcctcctgtgctgtcgagg

SEQ ID NO: 164476 - DNA, 20 bp, Homo sapiens
  source 1..20: mol_type = genomic DNA
gcctcctgtgctgtcgaggt

SEQ ID NO: 164477 - DNA, 20 bp, Homo sapiens
  source 1..20: mol_type = genomic DNA
cctcctgtgctgtcgaggtt

SEQ ID NO: 164478 - DNA, 20 bp, Homo sapiens
  source 1..20: mol_type = genomic DNA
ctcctgtgctgtcgaggttg

SEQ ID NO: 164479 - DNA, 20 bp, Homo sapiens
  source 1..20: mol_type = genomic DNA
tcctgtgctgtcgaggttgt

SEQ ID NO: 164480 - DNA, 20 bp, Homo sapiens
  source 1..20: mol_type = genomic DNA
cctgtgctgtcgaggttgtg

SEQ ID NO: 164481 - DNA, 20 bp, Homo sapiens
  source 1..20: mol_type = genomic DNA
ctgtgctgtcgaggttgtgc

SEQ ID NO: 164482 - DNA, 20 bp, Homo sapiens
  source 1..20: mol_type = genomic DNA
tgtgctgtcgaggttgtgct

SEQ ID NO: 164483 - DNA, 20 bp, Homo sapiens
  source 1..20: mol_type = genomic DNA
gtgctgtcgaggttgtgctc

SEQ ID NO: 164484 - DNA, 20 bp, Homo sapiens
  source 1..20: mol_type = genomic DNA
tgctgtcgaggttgtgctct

SEQ ID NO: 164485 - DNA, 20 bp, Homo sapiens
  source 1..20: mol_type = genomic DNA
gctgtcgaggttgtgctctg

SEQ ID NO: 164486 - DNA, 20 bp, Homo sapiens
  source 1..20: mol_type = genomic DNA
ctgtcgaggttgtgctctgt

SEQ ID NO: 164487 - DNA, 20 bp, Homo sapiens
  source 1..20: mol_type = genomic DNA
tgtcgaggttgtgctctgtg

SEQ ID NO: 164488 - DNA, 20 bp, Homo sapiens
  source 1..20: mol_type = genomic DNA
gtcgaggttgtgctctgtga

SEQ ID NO: 164489 - DNA, 20 bp, Homo sapiens
  source 1..20: mol_type = genomic DNA
tcgaggttgtgctctgtgaa

SEQ ID NO: 164490 - DNA, 20 bp, Homo sapiens
  source 1..20: mol_type = genomic DNA
cgaggttgtgctctgtgaat

SEQ ID NO: 164491 - DNA, 20 bp, Homo sapiens
  source 1..20: mol_type = genomic DNA
gaggttgtgctctgtgaatg

SEQ ID NO: 164492 - DNA, 20 bp, Homo sapiens
  source 1..20: mol_type = genomic DNA
aggttgtgctctgtgaatgt

SEQ ID NO: 164493 - DNA, 20 bp, Homo sapiens
  source 1..20: mol_type = genomic DNA
ggttgtgctctgtgaatgtc

SEQ ID NO: 164494 - DNA, 20 bp, Homo sapiens
  source 1..20: mol_type = genomic DNA
gttgtgctctgtgaatgtca

SEQ ID NO: 164495 - DNA, 20 bp, Homo sapiens
  source 1..20: mol_type = genomic DNA
ttgtgctctgtgaatgtcat

SEQ ID NO: 164496 - DNA, 20 bp, Homo sapiens
  source 1..20: mol_type = genomic DNA
tgtgctctgtgaatgtcatc

SEQ ID NO: 164497 - DNA, 20 bp, Homo sapiens
  source 1..20: mol_type = genomic DNA
gtgctctgtgaatgtcatcc

SEQ ID NO: 164498 - DNA, 20 bp, Homo sapiens
  source 1..20: mol_type = genomic DNA
tgctctgtgaatgtcatccc

SEQ ID NO: 164499 - DNA, 20 bp, Homo sapiens
  source 1..20: mol_type = genomic DNA
gctctgtgaatgtcatcccc

SEQ ID NO: 164500 - DNA, 20 bp, Homo sapiens
  source 1..20: mol_type = genomic DNA
ctctgtgaatgtcatcccct

SEQ ID NO: 164501 - DNA, 20 bp, Homo sapiens
  source 1..20: mol_type = genomic DNA
tctgtgaatgtcatcccctg

SEQ ID NO: 164502 - DNA, 20 bp, Homo sapiens
  source 1..20: mol_type = genomic DNA
ctgtgaatgtcatcccctgg

SEQ ID NO: 164503 - DNA, 20 bp, Homo sapiens
  source 1..20: mol_type = genomic DNA
tgtgaatgtcatcccctggt

SEQ ID NO: 164504 - DNA, 20 bp, Homo sapiens
  source 1..20: mol_type = genomic DNA
gtgaatgtcatcccctggtg

SEQ ID NO: 164505 - DNA, 20 bp, Homo sapiens
  source 1..20: mol_type = genomic DNA
tgaatgtcatcccctggtgc

SEQ ID NO: 164506 - DNA, 20 bp, Homo sapiens
  source 1..20: mol_type = genomic DNA
gaatgtcatcccctggtgca

SEQ ID NO: 164507 - DNA, 20 bp, Homo sapiens
  source 1..20: mol_type = genomic DNA
aatgtcatcccctggtgcac

SEQ ID NO: 164508 - DNA, 20 bp, Homo sapiens
  source 1..20: mol_type = genomic DNA
atgtcatcccctggtgcaca

SEQ ID NO: 164509 - DNA, 20 bp, Homo sapiens
  source 1..20: mol_type = genomic DNA
tgtcatcccctggtgcacag

SEQ ID NO: 164510 - DNA, 20 bp, Homo sapiens
  source 1..20: mol_type = genomic DNA
gtcatcccctggtgcacagc

SEQ ID NO: 164511 - DNA, 20 bp, Homo sapiens
  source 1..20: mol_type = genomic DNA
tcatcccctggtgcacagca

SEQ ID NO: 164512 - DNA, 20 bp, Homo sapiens
  source 1..20: mol_type = genomic DNA
catcccctggtgcacagcag

SEQ ID NO: 164513 - DNA, 20 bp, Homo sapiens
  source 1..20: mol_type = genomic DNA
atcccctggtgcacagcagc

SEQ ID NO: 164514 - DNA, 20 bp, Homo sapiens
  source 1..20: mol_type = genomic DNA
tcccctggtgcacagcagca

SEQ ID NO: 164515 - DNA, 20 bp, Homo sapiens
  source 1..20: mol_type = genomic DNA
cccctggtgcacagcagcac

SEQ ID NO: 164516 - DNA, 20 bp, Homo sapiens
  source 1..20: mol_type = genomic DNA
ccctggtgcacagcagcacc

SEQ ID NO: 164517 - DNA, 20 bp, Homo sapiens
  source 1..20: mol_type = genomic DNA
cctggtgcacagcagcacct

SEQ ID NO: 164518 - DNA, 20 bp, Homo sapiens
  source 1..20: mol_type = genomic DNA
ctggtgcacagcagcacctt

SEQ ID NO: 164519 - DNA, 20 bp, Homo sapiens
  source 1..20: mol_type = genomic DNA
tggtgcacagcagcaccttc

SEQ ID NO: 164520 - DNA, 20 bp, Homo sapiens
  source 1..20: mol_type = genomic DNA
ggtgcacagcagcaccttct

SEQ ID NO: 164521 - DNA, 20 bp, Homo sapiens
  source 1..20: mol_type = genomic DNA
gtgcacagcagcaccttcta

SEQ ID NO: 164522 - DNA, 20 bp, Homo sapiens
  source 1..20: mol_type = genomic DNA
tgcacagcagcaccttctac

SEQ ID NO: 164523 - DNA, 20 bp, Homo sapiens
  source 1..20: mol_type = genomic DNA
gcacagcagcaccttctaca

SEQ ID NO: 164524 - DNA, 20 bp, Homo sapiens
  source 1..20: mol_type = genomic DNA
cacagcagcaccttctacac

SEQ ID NO: 164525 - DNA, 20 bp, Homo sapiens
  source 1..20: mol_type = genomic DNA
acagcagcaccttctacaca

SEQ ID NO: 164526 - DNA, 20 bp, Homo sapiens
  source 1..20: mol_type = genomic DNA
cagcagcaccttctacacag

SEQ ID NO: 164527 - DNA, 20 bp, Homo sapiens
  source 1..20: mol_type = genomic DNA
agcagcaccttctacacagg

SEQ ID NO: 164528 - DNA, 20 bp, Homo sapiens
  source 1..20: mol_type = genomic DNA
gcagcaccttctacacagga

SEQ ID NO: 164529 - DNA, 20 bp, Homo sapiens
  source 1..20: mol_type = genomic DNA
cagcaccttctacacaggat

SEQ ID NO: 164530 - DNA, 20 bp, Homo sapiens
  source 1..20: mol_type = genomic DNA
agcaccttctacacaggata

SEQ ID NO: 164531 - DNA, 20 bp, Homo sapiens
  source 1..20: mol_type = genomic DNA
gcaccttctacacaggatac

SEQ ID NO: 164532 - DNA, 20 bp, Homo sapiens
  source 1..20: mol_type = genomic DNA
caccttctacacaggataca

SEQ ID NO: 164533 - DNA, 20 bp, Homo sapiens
  source 1..20: mol_type = genomic DNA
accttctacacaggatacag

SEQ ID NO: 164534 - DNA, 20 bp, Homo sapiens
  source 1..20: mol_type = genomic DNA
ccttctacacaggatacagt

SEQ ID NO: 164535 - DNA, 20 bp, Homo sapiens
  source 1..20: mol_type = genomic DNA
cttctacacaggatacagtt

SEQ ID NO: 164536 - DNA, 20 bp, Homo sapiens
  source 1..20: mol_type = genomic DNA
ttctacacaggatacagttg

SEQ ID NO: 164537 - DNA, 20 bp, Homo sapiens
  source 1..20: mol_type = genomic DNA
tctacacaggatacagttgg

SEQ ID NO: 164538 - DNA, 20 bp, Homo sapiens
  source 1..20: mol_type = genomic DNA
ctacacaggatacagttgga

SEQ ID NO: 164539 - DNA, 20 bp, Homo sapiens
  source 1..20: mol_type = genomic DNA
tacacaggatacagttggaa

SEQ ID NO: 164540 - DNA, 20 bp, Homo sapiens
  source 1..20: mol_type = genomic DNA
acacaggatacagttggaat

SEQ ID NO: 164541 - DNA, 20 bp, Homo sapiens
  source 1..20: mol_type = genomic DNA
cacaggatacagttggaatg

SEQ ID NO: 164542 - DNA, 20 bp, Homo sapiens
  source 1..20: mol_type = genomic DNA
acaggatacagttggaatgc

SEQ ID NO: 164543 - DNA, 20 bp, Homo sapiens
  source 1..20: mol_type = genomic DNA
caggatacagttggaatgcc

SEQ ID NO: 164544 - DNA, 20 bp, Homo sapiens
  source 1..20: mol_type = genomic DNA
aggatacagttggaatgccg

SEQ ID NO: 164545 - DNA, 20 bp, Homo sapiens
  source 1..20: mol_type = genomic DNA
ggatacagttggaatgccgc

SEQ ID NO: 164546 - DNA, 20 bp, Homo sapiens
  source 1..20: mol_type = genomic DNA
gatacagttggaatgccgcc

SEQ ID NO: 164547 - DNA, 20 bp, Homo sapiens
  source 1..20: mol_type = genomic DNA
atacagttggaatgccgccc

SEQ ID NO: 164548 - DNA, 20 bp, Homo sapiens
  source 1..20: mol_type = genomic DNA
tacagttggaatgccgcccc

SEQ ID NO: 164549 - DNA, 20 bp, Homo sapiens
  source 1..20: mol_type = genomic DNA
acagttggaatgccgccccc

SEQ ID NO: 164550 - DNA, 20 bp, Homo sapiens
  source 1..20: mol_type = genomic DNA
cagttggaatgccgccccct

SEQ ID NO: 164551 - DNA, 20 bp, Homo sapiens
  source 1..20: mol_type = genomic DNA
agttggaatgccgccccctc

SEQ ID NO: 164552 - DNA, 20 bp, Homo sapiens
  source 1..20: mol_type = genomic DNA
gttggaatgccgccccctcg

SEQ ID NO: 164553 - DNA, 20 bp, Homo sapiens
  source 1..20: mol_type = genomic DNA
ttggaatgccgccccctcga

SEQ ID NO: 164554 - DNA, 20 bp, Homo sapiens
  source 1..20: mol_type = genomic DNA
tggaatgccgccccctcgag

SEQ ID NO: 164555 - DNA, 20 bp, Homo sapiens
  source 1..20: mol_type = genomic DNA
ggaatgccgccccctcgagt

SEQ ID NO: 164556 - DNA, 20 bp, Homo sapiens
  source 1..20: mol_type = genomic DNA
gaatgccgccccctcgagtt

SEQ ID NO: 164557 - DNA, 20 bp, Homo sapiens
  source 1..20: mol_type = genomic DNA
aatgccgccccctcgagttg

SEQ ID NO: 164558 - DNA, 20 bp, Homo sapiens
  source 1..20: mol_type = genomic DNA
atgccgccccctcgagttgt

SEQ ID NO: 164559 - DNA, 20 bp, Homo sapiens
  source 1..20: mol_type = genomic DNA
tgccgccccctcgagttgtg

SEQ ID NO: 164560 - DNA, 20 bp, Homo sapiens
  source 1..20: mol_type = genomic DNA
gccgccccctcgagttgtgt

SEQ ID NO: 164561 - DNA, 20 bp, Homo sapiens
  source 1..20: mol_type = genomic DNA
ccgccccctcgagttgtgta

SEQ ID NO: 164562 - DNA, 20 bp, Homo sapiens
  source 1..20: mol_type = genomic DNA
cgccccctcgagttgtgtaa

SEQ ID NO: 164563 - DNA, 20 bp, Homo sapiens
  source 1..20: mol_type = genomic DNA
gccccctcgagttgtgtaag

SEQ ID NO: 164564 - DNA, 20 bp, Homo sapiens
  source 1..20: mol_type = genomic DNA
ccccctcgagttgtgtaagg

SEQ ID NO: 164565 - DNA, 20 bp, Homo sapiens
  source 1..20: mol_type = genomic DNA
cccctcgagttgtgtaaggc

SEQ ID NO: 164566 - DNA, 20 bp, Homo sapiens
  source 1..20: mol_type = genomic DNA
ccctcgagttgtgtaaggca

SEQ ID NO: 164567 - DNA, 20 bp, Homo sapiens
  source 1..20: mol_type = genomic DNA
cctcgagttgtgtaaggcag

SEQ ID NO: 164568 - DNA, 20 bp, Homo sapiens
  source 1..20: mol_type = genomic DNA
ctcgagttgtgtaaggcagc

SEQ ID NO: 164569 - DNA, 20 bp, Homo sapiens
  source 1..20: mol_type = genomic DNA
tcgagttgtgtaaggcagca

SEQ ID NO: 164570 - DNA, 20 bp, Homo sapiens
  source 1..20: mol_type = genomic DNA
cgagttgtgtaaggcagcag

SEQ ID NO: 164571 - DNA, 20 bp, Homo sapiens
  source 1..20: mol_type = genomic DNA
gagttgtgtaaggcagcagc

SEQ ID NO: 164572 - DNA, 20 bp, Homo sapiens
  source 1..20: mol_type = genomic DNA
agttgtgtaaggcagcagcc

SEQ ID NO: 164573 - DNA, 20 bp, Homo sapiens
  source 1..20: mol_type = genomic DNA
gttgtgtaaggcagcagcct

SEQ ID NO: 164574 - DNA, 20 bp, Homo sapiens
  source 1..20: mol_type = genomic DNA
ttgtgtaaggcagcagcctt

SEQ ID NO: 164575 - DNA, 20 bp, Homo sapiens
  source 1..20: mol_type = genomic DNA
tgtgtaaggcagcagccttg

SEQ ID NO: 164576 - DNA, 20 bp, Homo sapiens
  source 1..20: mol_type = genomic DNA
gtgtaaggcagcagccttgg

SEQ ID NO: 164577 - DNA, 20 bp, Homo sapiens
  source 1..20: mol_type = genomic DNA
tgtaaggcagcagccttggc

SEQ ID NO: 164578 - DNA, 20 bp, Homo sapiens
  source 1..20: mol_type = genomic DNA
gtaaggcagcagccttggcc

SEQ ID NO: 164579 - DNA, 20 bp, Homo sapiens
  source 1..20: mol_type = genomic DNA
taaggcagcagccttggccc

SEQ ID NO: 164580 - DNA, 20 bp, Homo sapiens
  source 1..20: mol_type = genomic DNA
aaggcagcagccttggccct

SEQ ID NO: 164581 - DNA, 20 bp, Homo sapiens
  source 1..20: mol_type = genomic DNA
aggcagcagccttggccctt

SEQ ID NO: 164582 - DNA, 20 bp, Homo sapiens
  source 1..20: mol_type = genomic DNA
ggcagcagccttggcccttg

SEQ ID NO: 164583 - DNA, 20 bp, Homo sapiens
  source 1..20: mol_type = genomic DNA
gcagcagccttggcccttgc

SEQ ID NO: 164584 - DNA, 20 bp, Homo sapiens
  source 1..20: mol_type = genomic DNA
cagcagccttggcccttgca

SEQ ID NO: 164585 - DNA, 20 bp, Homo sapiens
  source 1..20: mol_type = genomic DNA
agcagccttggcccttgcac

SEQ ID NO: 164586 - DNA, 20 bp, Homo sapiens
  source 1..20: mol_type = genomic DNA
gcagccttggcccttgcaca

SEQ ID NO: 164587 - DNA, 20 bp, Homo sapiens
  source 1..20: mol_type = genomic DNA
cagccttggcccttgcacat

SEQ ID NO: 164588 - DNA, 20 bp, Homo sapiens
  source 1..20: mol_type = genomic DNA
agccttggcccttgcacata

SEQ ID NO: 164589 - DNA, 20 bp, Homo sapiens
  source 1..20: mol_type = genomic DNA
gccttggcccttgcacataa

SEQ ID NO: 164590 - DNA, 20 bp, Homo sapiens
  source 1..20: mol_type = genomic DNA
ccttggcccttgcacataag

SEQ ID NO: 164591 - DNA, 20 bp, Homo sapiens
  source 1..20: mol_type = genomic DNA
cttggcccttgcacataaga

SEQ ID NO: 164592 - DNA, 20 bp, Homo sapiens
  source 1..20: mol_type = genomic DNA
ttggcccttgcacataagat

SEQ ID NO: 164593 - DNA, 20 bp, Homo sapiens
  source 1..20: mol_type = genomic DNA
tggcccttgcacataagatg

SEQ ID NO: 164594 - DNA, 20 bp, Homo sapiens
  source 1..20: mol_type = genomic DNA
ggcccttgcacataagatgc

SEQ ID NO: 164595 - DNA, 20 bp, Homo sapiens
  source 1..20: mol_type = genomic DNA
gcccttgcacataagatgct

SEQ ID NO: 164596 - DNA, 20 bp, Homo sapiens
  source 1..20: mol_type = genomic DNA
cccttgcacataagatgctg

SEQ ID NO: 164597 - DNA, 20 bp, Homo sapiens
  source 1..20: mol_type = genomic DNA
ccttgcacataagatgctgt

SEQ ID NO: 164598 - DNA, 20 bp, Homo sapiens
  source 1..20: mol_type = genomic DNA
cttgcacataagatgctgtt

SEQ ID NO: 164599 - DNA, 20 bp, Homo sapiens
  source 1..20: mol_type = genomic DNA
ttgcacataagatgctgttg

SEQ ID NO: 164600 - DNA, 20 bp, Homo sapiens
  source 1..20: mol_type = genomic DNA
tgcacataagatgctgttga

SEQ ID NO: 164601 - DNA, 20 bp, Homo sapiens
  source 1..20: mol_type = genomic DNA
gcacataagatgctgttgaa

SEQ ID NO: 164602 - DNA, 20 bp, Homo sapiens
  source 1..20: mol_type = genomic DNA
cacataagatgctgttgaat

SEQ ID NO: 164603 - DNA, 20 bp, Homo sapiens
  source 1..20: mol_type = genomic DNA
acataagatgctgttgaata

SEQ ID NO: 164604 - DNA, 20 bp, Homo sapiens
  source 1..20: mol_type = genomic DNA
cataagatgctgttgaatat

SEQ ID NO: 164605 - DNA, 20 bp, Homo sapiens
  source 1..20: mol_type = genomic DNA
ataagatgctgttgaatatt

SEQ ID NO: 164606 - DNA, 20 bp, Homo sapiens
  source 1..20: mol_type = genomic DNA
taagatgctgttgaatattc

SEQ ID NO: 164607 - DNA, 20 bp, Homo sapiens
  source 1..20: mol_type = genomic DNA
aagatgctgttgaatattct

SEQ ID NO: 164608 - DNA, 20 bp, Homo sapiens
  source 1..20: mol_type = genomic DNA
agatgctgttgaatattctg

SEQ ID NO: 164609 - DNA, 20 bp, Homo sapiens
  source 1..20: mol_type = genomic DNA
gatgctgttgaatattctgc

SEQ ID NO: 164610 - DNA, 20 bp, Homo sapiens
  source 1..20: mol_type = genomic DNA
atgctgttgaatattctgcc

SEQ ID NO: 164611 - DNA, 20 bp, Homo sapiens
  source 1..20: mol_type = genomic DNA
tgctgttgaatattctgcct

SEQ ID NO: 164612 - DNA, 20 bp, Homo sapiens
  source 1..20: mol_type = genomic DNA
gctgttgaatattctgcctg

SEQ ID NO: 164613 - DNA, 20 bp, Homo sapiens
  source 1..20: mol_type = genomic DNA
ctgttgaatattctgcctgc

SEQ ID NO: 164614 - DNA, 20 bp, Homo sapiens
  source 1..20: mol_type = genomic DNA
tgttgaatattctgcctgca

SEQ ID NO: 164615 - DNA, 20 bp, Homo sapiens
  source 1..20: mol_type = genomic DNA
gttgaatattctgcctgcac

SEQ ID NO: 164616 - DNA, 20 bp, Homo sapiens
  source 1..20: mol_type = genomic DNA
ttgaatattctgcctgcacc

SEQ ID NO: 164617 - DNA, 20 bp, Homo sapiens
  source 1..20: mol_type = genomic DNA
tgaatattctgcctgcacca

SEQ ID NO: 164618 - DNA, 20 bp, Homo sapiens
  source 1..20: mol_type = genomic DNA
gaatattctgcctgcaccaa

SEQ ID NO: 164619 - DNA, 20 bp, Homo sapiens
  source 1..20: mol_type = genomic DNA
aatattctgcctgcaccaag

SEQ ID NO: 164620 - DNA, 20 bp, Homo sapiens
  source 1..20: mol_type = genomic DNA
atattctgcctgcaccaagt

SEQ ID NO: 164621 - DNA, 20 bp, Homo sapiens
  source 1..20: mol_type = genomic DNA
tattctgcctgcaccaagta

SEQ ID NO: 164622 - DNA, 20 bp, Homo sapiens
  source 1..20: mol_type = genomic DNA
attctgcctgcaccaagtaa

SEQ ID NO: 164623 - DNA, 20 bp, Homo sapiens
  source 1..20: mol_type = genomic DNA
ttctgcctgcaccaagtaaa

SEQ ID NO: 164624 - DNA, 20 bp, Homo sapiens
  source 1..20: mol_type = genomic DNA
tctgcctgcaccaagtaaag

SEQ ID NO: 164625 - DNA, 20 bp, Homo sapiens
  source 1..20: mol_type = genomic DNA
ctgcctgcaccaagtaaagg

SEQ ID NO: 164626 - DNA, 20 bp, Homo sapiens
  source 1..20: mol_type = genomic DNA
tgcctgcaccaagtaaaggg

SEQ ID NO: 164627 - DNA, 20 bp, Homo sapiens
  source 1..20: mol_type = genomic DNA
gcctgcaccaagtaaagggc

SEQ ID NO: 164628 - DNA, 20 bp, Homo sapiens
  source 1..20: mol_type = genomic DNA
cctgcaccaagtaaagggca

SEQ ID NO: 164629 - DNA, 20 bp, Homo sapiens
  source 1..20: mol_type = genomic DNA
ctgcaccaagtaaagggcac

SEQ ID NO: 164630 - DNA, 20 bp, Homo sapiens
  source 1..20: mol_type = genomic DNA
tgcaccaagtaaagggcaca

SEQ ID NO: 164631 - DNA, 20 bp, Homo sapiens
  source 1..20: mol_type = genomic DNA
gcaccaagtaaagggcacag

SEQ ID NO: 164632 - DNA, 20 bp, Homo sapiens
  source 1..20: mol_type = genomic DNA
caccaagtaaagggcacaga

SEQ ID NO: 164633 - DNA, 20 bp, Homo sapiens
  source 1..20: mol_type = genomic DNA
accaagtaaagggcacagat

SEQ ID NO: 164634 - DNA, 20 bp, Homo sapiens
  source 1..20: mol_type = genomic DNA
ccaagtaaagggcacagata

SEQ ID NO: 164635 - DNA, 20 bp, Homo sapiens
  source 1..20: mol_type = genomic DNA
caagtaaagggcacagatag

SEQ ID NO: 164636 - DNA, 20 bp, Homo sapiens
  source 1..20: mol_type = genomic DNA
aagtaaagggcacagataga

SEQ ID NO: 164637 - DNA, 20 bp, Homo sapiens
  source 1..20: mol_type = genomic DNA
agtaaagggcacagatagaa

SEQ ID NO: 164638 - DNA, 20 bp, Homo sapiens
  source 1..20: mol_type = genomic DNA
gtaaagggcacagatagaac

SEQ ID NO: 164639 - DNA, 20 bp, Homo sapiens
  source 1..20: mol_type = genomic DNA
taaagggcacagatagaact

SEQ ID NO: 164640 - DNA, 20 bp, Homo sapiens
  source 1..20: mol_type = genomic DNA
aaagggcacagatagaactg

SEQ ID NO: 164641 - DNA, 20 bp, Homo sapiens
  source 1..20: mol_type = genomic DNA
aagggcacagatagaactgc

SEQ ID NO: 164642 - DNA, 20 bp, Homo sapiens
  source 1..20: mol_type = genomic DNA
agggcacagatagaactgct

SEQ ID NO: 164643 - DNA, 20 bp, Homo sapiens
  source 1..20: mol_type = genomic DNA
gggcacagatagaactgctt

SEQ ID NO: 164644 - DNA, 20 bp, Homo sapiens
  source 1..20: mol_type = genomic DNA
ggcacagatagaactgcttg

SEQ ID NO: 164645 - DNA, 20 bp, Homo sapiens
  source 1..20: mol_type = genomic DNA
gcacagatagaactgcttgg

SEQ ID NO: 164646 - DNA, 20 bp, Homo sapiens
  source 1..20: mol_type = genomic DNA
cacagatagaactgcttggc

SEQ ID NO: 164647 - DNA, 20 bp, Homo sapiens
  source 1..20: mol_type = genomic DNA
acagatagaactgcttggca

SEQ ID NO: 164648 - DNA, 20 bp, Homo sapiens
  source 1..20: mol_type = genomic DNA
cagatagaactgcttggcat

SEQ ID NO: 164649 - DNA, 20 bp, Homo sapiens
  source 1..20: mol_type = genomic DNA
agatagaactgcttggcata

SEQ ID NO: 164650 - DNA, 20 bp, Homo sapiens
  source 1..20: mol_type = genomic DNA
gatagaactgcttggcatat

SEQ ID NO: 164651 - DNA, 20 bp, Homo sapiens
  source 1..20: mol_type = genomic DNA
atagaactgcttggcatatg

SEQ ID NO: 164652 - DNA, 20 bp, Homo sapiens
  source 1..20: mol_type = genomic DNA
tagaactgcttggcatatgt

SEQ ID NO: 164653 - DNA, 20 bp, Homo sapiens
  source 1..20: mol_type = genomic DNA
agaactgcttggcatatgtt

SEQ ID NO: 164654 - DNA, 20 bp, Homo sapiens
  source 1..20: mol_type = genomic DNA
gaactgcttggcatatgttg

SEQ ID NO: 164655 - DNA, 20 bp, Homo sapiens
  source 1..20: mol_type = genomic DNA
aactgcttggcatatgttgc

SEQ ID NO: 164656 - DNA, 20 bp, Homo sapiens
  source 1..20: mol_type = genomic DNA
actgcttggcatatgttgct

SEQ ID NO: 164657 - DNA, 20 bp, Homo sapiens
  source 1..20: mol_type = genomic DNA
ctgcttggcatatgttgctg

SEQ ID NO: 164658 - DNA, 20 bp, Homo sapiens
  source 1..20: mol_type = genomic DNA
tgcttggcatatgttgctgg

SEQ ID NO: 164659 - DNA, 20 bp, Homo sapiens
  source 1..20: mol_type = genomic DNA
gcttggcatatgttgctggg

SEQ ID NO: 164660 - DNA, 20 bp, Homo sapiens
  source 1..20: mol_type = genomic DNA
cttggcatatgttgctgggg

SEQ ID NO: 164661 - DNA, 20 bp, Homo sapiens
  source 1..20: mol_type = genomic DNA
ttggcatatgttgctgggga

SEQ ID NO: 164662 - DNA, 20 bp, Homo sapiens
  source 1..20: mol_type = genomic DNA
tggcatatgttgctggggag

SEQ ID NO: 164663 - DNA, 20 bp, Homo sapiens
  source 1..20: mol_type = genomic DNA
ggcatatgttgctggggaga

SEQ ID NO: 164664 - DNA, 20 bp, Homo sapiens
  source 1..20: mol_type = genomic DNA
gcatatgttgctggggagat

SEQ ID NO: 164665 - DNA, 20 bp, Homo sapiens
  source 1..20: mol_type = genomic DNA
catatgttgctggggagatg

SEQ ID NO: 164666 - DNA, 20 bp, Homo sapiens
  source 1..20: mol_type = genomic DNA
atatgttgctggggagatga

SEQ ID NO: 164667 - DNA, 20 bp, Homo sapiens
  source 1..20: mol_type = genomic DNA
tatgttgctggggagatgag

SEQ ID NO: 164668 - DNA, 20 bp, Homo sapiens
  source 1..20: mol_type = genomic DNA
atgttgctggggagatgagt

SEQ ID NO: 164669 - DNA, 20 bp, Homo sapiens
  source 1..20: mol_type = genomic DNA
tgttgctggggagatgagtt

SEQ ID NO: 164670 - DNA, 20 bp, Homo sapiens
  source 1..20: mol_type = genomic DNA
gttgctggggagatgagttt

SEQ ID NO: 164671 - DNA, 20 bp, Homo sapiens
  source 1..20: mol_type = genomic DNA
ttgctggggagatgagtttt

SEQ ID NO: 164672 - DNA, 20 bp, Homo sapiens
  source 1..20: mol_type = genomic DNA
tgctggggagatgagttttt

SEQ ID NO: 164673 - DNA, 20 bp, Homo sapiens
  source 1..20: mol_type = genomic DNA
gctggggagatgagtttttt

SEQ ID NO: 164674 - DNA, 20 bp, Homo sapiens
  source 1..20: mol_type = genomic DNA
ctggggagatgagttttttg

SEQ ID NO: 164675 - DNA, 20 bp, Homo sapiens
  source 1..20: mol_type = genomic DNA
tggggagatgagttttttgt

SEQ ID NO: 164676 - DNA, 20 bp, Homo sapiens
  source 1..20: mol_type = genomic DNA
ggggagatgagttttttgta

SEQ ID NO: 164677 - DNA, 20 bp, Homo sapiens
  source 1..20: mol_type = genomic DNA
gggagatgagttttttgtaa

SEQ ID NO: 164678 - DNA, 20 bp, Homo sapiens
  source 1..20: mol_type = genomic DNA
ggagatgagttttttgtaaa

SEQ ID NO: 164679 - DNA, 20 bp, Homo sapiens
  source 1..20: mol_type = genomic DNA
gagatgagttttttgtaaag

SEQ ID NO: 164680 - DNA, 20 bp, Homo sapiens
  source 1..20: mol_type = genomic DNA
agatgagttttttgtaaagt

SEQ ID NO: 164681 - DNA, 20 bp, Homo sapiens
  source 1..20: mol_type = genomic DNA
gatgagttttttgtaaagta

SEQ ID NO: 164682 - DNA, 20 bp, Homo sapiens
  source 1..20: mol_type = genomic DNA
atgagttttttgtaaagtat

SEQ ID NO: 164683 - DNA, 20 bp, Homo sapiens
  source 1..20: mol_type = genomic DNA
tgagttttttgtaaagtata

SEQ ID NO: 164684 - DNA, 20 bp, Homo sapiens
  source 1..20: mol_type = genomic DNA
gagttttttgtaaagtatac

SEQ ID NO: 164685 - DNA, 20 bp, Homo sapiens
  source 1..20: mol_type = genomic DNA
agttttttgtaaagtatact

SEQ ID NO: 164686 - DNA, 20 bp, Homo sapiens
  source 1..20: mol_type = genomic DNA
gttttttgtaaagtatacta

SEQ ID NO: 164687 - DNA, 20 bp, Homo sapiens
  source 1..20: mol_type = genomic DNA
ttttttgtaaagtatactac

SEQ ID NO: 164688 - DNA, 20 bp, Homo sapiens
  source 1..20: mol_type = genomic DNA
tttttgtaaagtatactacg

SEQ ID NO: 164689 - DNA, 20 bp, Homo sapiens
  source 1..20: mol_type = genomic DNA
ttttgtaaagtatactacgt

SEQ ID NO: 164690 - DNA, 20 bp, Homo sapiens
  source 1..20: mol_type = genomic DNA
tttgtaaagtatactacgtt

SEQ ID NO: 164691 - DNA, 20 bp, Homo sapiens
  source 1..20: mol_type = genomic DNA
ttgtaaagtatactacgttc

SEQ ID NO: 164692 - DNA, 20 bp, Homo sapiens
  source 1..20: mol_type = genomic DNA
tgtaaagtatactacgttct

SEQ ID NO: 164693 - DNA, 20 bp, Homo sapiens
  source 1..20: mol_type = genomic DNA
gtaaagtatactacgttctt

SEQ ID NO: 164694 - DNA, 20 bp, Homo sapiens
  source 1..20: mol_type = genomic DNA
taaagtatactacgttctta

SEQ ID NO: 164695 - DNA, 20 bp, Homo sapiens
  source 1..20: mol_type = genomic DNA
aaagtatactacgttcttaa

SEQ ID NO: 164696 - DNA, 20 bp, Homo sapiens
  source 1..20: mol_type = genomic DNA
aagtatactacgttcttaag

SEQ ID NO: 164697 - DNA, 20 bp, Homo sapiens
  source 1..20: mol_type = genomic DNA
agtatactacgttcttaaga

SEQ ID NO: 164698 - DNA, 20 bp, Homo sapiens
  source 1..20: mol_type = genomic DNA
gtatactacgttcttaagaa

SEQ ID NO: 164699 - DNA, 20 bp, Homo sapiens
  source 1..20: mol_type = genomic DNA
tatactacgttcttaagaat

SEQ ID NO: 164700 - DNA, 20 bp, Homo sapiens
  source 1..20: mol_type = genomic DNA
atactacgttcttaagaatt

SEQ ID NO: 164701 - DNA, 20 bp, Homo sapiens
  source 1..20: mol_type = genomic DNA
tactacgttcttaagaattt

SEQ ID NO: 164702 - DNA, 20 bp, Homo sapiens
  source 1..20: mol_type = genomic DNA
actacgttcttaagaatttg

SEQ ID NO: 164703 - DNA, 20 bp, Homo sapiens
  source 1..20: mol_type = genomic DNA
ctacgttcttaagaatttgg

SEQ ID NO: 164704 - DNA, 20 bp, Homo sapiens
  source 1..20: mol_type = genomic DNA
tacgttcttaagaatttgga

SEQ ID NO: 164705 - DNA, 20 bp, Homo sapiens
  source 1..20: mol_type = genomic DNA
acgttcttaagaatttggat

SEQ ID NO: 164706 - DNA, 20 bp, Homo sapiens
  source 1..20: mol_type = genomic DNA
cgttcttaagaatttggatc

SEQ ID NO: 164707 - DNA, 20 bp, Homo sapiens
  source 1..20: mol_type = genomic DNA
gttcttaagaatttggatca

SEQ ID NO: 164708 - DNA, 20 bp, Homo sapiens
  source 1..20: mol_type = genomic DNA
ttcttaagaatttggatcat

SEQ ID NO: 164709 - DNA, 20 bp, Homo sapiens
  source 1..20: mol_type = genomic DNA
tcttaagaatttggatcata

SEQ ID NO: 164710 - DNA, 20 bp, Homo sapiens
  source 1..20: mol_type = genomic DNA
cttaagaatttggatcataa

SEQ ID NO: 164711 - DNA, 20 bp, Homo sapiens
  source 1..20: mol_type = genomic DNA
ttaagaatttggatcataac

SEQ ID NO: 164712 - DNA, 20 bp, Homo sapiens
  source 1..20: mol_type = genomic DNA
taagaatttggatcataacc

SEQ ID NO: 164713 - DNA, 20 bp, Homo sapiens
  source 1..20: mol_type = genomic DNA
aagaatttggatcataacca

SEQ ID NO: 164714 - DNA, 20 bp, Homo sapiens
  source 1..20: mol_type = genomic DNA
agaatttggatcataaccat

SEQ ID NO: 164715 - DNA, 20 bp, Homo sapiens
  source 1..20: mol_type = genomic DNA
gaatttggatcataaccatg

SEQ ID NO: 164716 - DNA, 20 bp, Homo sapiens
  source 1..20: mol_type = genomic DNA
aatttggatcataaccatgg

SEQ ID NO: 164717 - DNA, 20 bp, Homo sapiens
  source 1..20: mol_type = genomic DNA
atttggatcataaccatggg

SEQ ID NO: 164718 - DNA, 20 bp, Homo sapiens
  source 1..20: mol_type = genomic DNA
tttggatcataaccatggga

SEQ ID NO: 164719 - DNA, 20 bp, Homo sapiens
  source 1..20: mol_type = genomic DNA
ttggatcataaccatgggat

SEQ ID NO: 164720 - DNA, 20 bp, Homo sapiens
  source 1..20: mol_type = genomic DNA
tggatcataaccatgggatt

SEQ ID NO: 164721 - DNA, 20 bp, Homo sapiens
  source 1..20: mol_type = genomic DNA
ggatcataaccatgggattt

SEQ ID NO: 164722 - DNA, 20 bp, Homo sapiens
  source 1..20: mol_type = genomic DNA
gatcataaccatgggatttt

SEQ ID NO: 164723 - DNA, 20 bp, Homo sapiens
  source 1..20: mol_type = genomic DNA
atcataaccatgggatttta

SEQ ID NO: 164724 - DNA, 20 bp, Homo sapiens
  source 1..20: mol_type = genomic DNA
tcataaccatgggattttaa

SEQ ID NO: 164725 - DNA, 20 bp, Homo sapiens
  source 1..20: mol_type = genomic DNA
cataaccatgggattttaat

SEQ ID NO: 164726 - DNA, 20 bp, Homo sapiens
  source 1..20: mol_type = genomic DNA
ataaccatgggattttaata

SEQ ID NO: 164727 - DNA, 20 bp, Homo sapiens
  source 1..20: mol_type = genomic DNA
taaccatgggattttaataa

SEQ ID NO: 164728 - DNA, 20 bp, Homo sapiens
  source 1..20: mol_type = genomic DNA
aaccatgggattttaataat

SEQ ID NO: 164729 - DNA, 20 bp, Homo sapiens
  source 1..20: mol_type = genomic DNA
accatgggattttaataata

SEQ ID NO: 164730 - DNA, 20 bp, Homo sapiens
  source 1..20: mol_type = genomic DNA
ccatgggattttaataatag

SEQ ID NO: 164731 - DNA, 20 bp, Homo sapiens
  source 1..20: mol_type = genomic DNA
catgggattttaataataga

SEQ ID NO: 164732 - DNA, 20 bp, Homo sapiens
  source 1..20: mol_type = genomic DNA
atgggattttaataatagaa

SEQ ID NO: 164733 - DNA, 20 bp, Homo sapiens
  source 1..20: mol_type = genomic DNA
tgggattttaataatagaaa

SEQ ID NO: 164734 - DNA, 20 bp, Homo sapiens
  source 1..20: mol_type = genomic DNA
gggattttaataatagaaaa

SEQ ID NO: 164735 - DNA, 20 bp, Homo sapiens
  source 1..20: mol_type = genomic DNA
ggattttaataatagaaaaa

SEQ ID NO: 164736 - DNA, 20 bp, Homo sapiens
  source 1..20: mol_type = genomic DNA
gattttaataatagaaaaac

SEQ ID NO: 164737 - DNA, 20 bp, Homo sapiens
  source 1..20: mol_type = genomic DNA
attttaataatagaaaaact

SEQ ID NO: 164738 - DNA, 20 bp, Homo sapiens
  source 1..20: mol_type = genomic DNA
ttttaataatagaaaaactg

SEQ ID NO: 164739 - DNA, 20 bp, Homo sapiens
  source 1..20: mol_type = genomic DNA
tttaataatagaaaaactgt

SEQ ID NO: 164740 - DNA, 20 bp, Homo sapiens
  source 1..20: mol_type = genomic DNA
ttaataatagaaaaactgtt

SEQ ID NO: 164741 - DNA, 20 bp, Homo sapiens
  source 1..20: mol_type = genomic DNA
taataatagaaaaactgttg

SEQ ID NO: 164742 - DNA, 20 bp, Homo sapiens
  source 1..20: mol_type = genomic DNA
aataatagaaaaactgttga

SEQ ID NO: 164743 - DNA, 20 bp, Homo sapiens
  source 1..20: mol_type = genomic DNA
ataatagaaaaactgttgaa

SEQ ID NO: 164744 - DNA, 20 bp, Homo sapiens
  source 1..20: mol_type = genomic DNA
taatagaaaaactgttgaag

SEQ ID NO: 164745 - DNA, 20 bp, Homo sapiens
  source 1..20: mol_type = genomic DNA
aatagaaaaactgttgaaga

SEQ ID NO: 164746 - DNA, 20 bp, Homo sapiens
  source 1..20: mol_type = genomic DNA
atagaaaaactgttgaagat

SEQ ID NO: 164747 - DNA, 20 bp, Homo sapiens
  source 1..20: mol_type = genomic DNA
tagaaaaactgttgaagatc

SEQ ID NO: 164748 - DNA, 20 bp, Homo sapiens
  source 1..20: mol_type = genomic DNA
agaaaaactgttgaagatca

SEQ ID NO: 164749 - DNA, 20 bp, Homo sapiens
  source 1..20: mol_type = genomic DNA
gaaaaactgttgaagatcag

SEQ ID NO: 164750 - DNA, 20 bp, Homo sapiens
  source 1..20: mol_type = genomic DNA
aaaaactgttgaagatcagt

SEQ ID NO: 164751 - DNA, 20 bp, Homo sapiens
  source 1..20: mol_type = genomic DNA
aaaactgttgaagatcagtc

SEQ ID NO: 164752 - DNA, 20 bp, Homo sapiens
  source 1..20: mol_type = genomic DNA
aaactgttgaagatcagtct

SEQ ID NO: 164753 - DNA, 20 bp, Homo sapiens
  source 1..20: mol_type = genomic DNA
aactgttgaagatcagtctg

SEQ ID NO: 164754 - DNA, 20 bp, Homo sapiens
  source 1..20: mol_type = genomic DNA
actgttgaagatcagtctgg

SEQ ID NO: 164755 - DNA, 20 bp, Homo sapiens
  source 1..20: mol_type = genomic DNA
ctgttgaagatcagtctggt

SEQ ID NO: 164756 - DNA, 20 bp, Homo sapiens
  source 1..20: mol_type = genomic DNA
tgttgaagatcagtctggtc

SEQ ID NO: 164757 - DNA, 20 bp, Homo sapiens
  source 1..20: mol_type = genomic DNA
gttgaagatcagtctggtcc

SEQ ID NO: 164758 - DNA, 20 bp, Homo sapiens
  source 1..20: mol_type = genomic DNA
ttgaagatcagtctggtccc

SEQ ID NO: 164759 - DNA, 20 bp, Homo sapiens
  source 1..20: mol_type = genomic DNA
tgaagatcagtctggtccct

SEQ ID NO: 164760 - DNA, 20 bp, Homo sapiens
  source 1..20: mol_type = genomic DNA
gaagatcagtctggtccctt

SEQ ID NO: 164761 - DNA, 20 bp, Homo sapiens
  source 1..20: mol_type = genomic DNA
aagatcagtctggtccctta

SEQ ID NO: 164762 - DNA, 20 bp, Homo sapiens
  source 1..20: mol_type = genomic DNA
agatcagtctggtcccttat

SEQ ID NO: 164763 - DNA, 20 bp, Homo sapiens
  source 1..20: mol_type = genomic DNA
gatcagtctggtcccttatt

SEQ ID NO: 164764 - DNA, 20 bp, Homo sapiens
  source 1..20: mol_type = genomic DNA
atcagtctggtcccttattt

SEQ ID NO: 164765 - DNA, 20 bp, Homo sapiens
  source 1..20: mol_type = genomic DNA
tcagtctggtcccttatttt

SEQ ID NO: 164766 - DNA, 20 bp, Homo sapiens
  source 1..20: mol_type = genomic DNA
cagtctggtcccttattttt

SEQ ID NO: 164767 - DNA, 20 bp, Homo sapiens
  source 1..20: mol_type = genomic DNA
agtctggtcccttattttta

SEQ ID NO: 164768 - DNA, 20 bp, Homo sapiens
  source 1..20: mol_type = genomic DNA
gtctggtcccttatttttac

SEQ ID NO: 164769 - DNA, 20 bp, Homo sapiens
  source 1..20: mol_type = genomic DNA
tctggtcccttatttttaca

SEQ ID NO: 164770 - DNA, 20 bp, Homo sapiens
  source 1..20: mol_type = genomic DNA
ctggtcccttatttttacag

SEQ ID NO: 164771 - DNA, 20 bp, Homo sapiens
  source 1..20: mol_type = genomic DNA
tggtcccttatttttacagt

SEQ ID NO: 164772 - DNA, 20 bp, Homo sapiens
  source 1..20: mol_type = genomic DNA
ggtcccttatttttacagtg

SEQ ID NO: 164773 - DNA, 20 bp, Homo sapiens
  source 1..20: mol_type = genomic DNA
gtcccttatttttacagtga

SEQ ID NO: 164774 - DNA, 20 bp, Homo sapiens
  source 1..20: mol_type = genomic DNA
tcccttatttttacagtgaa

SEQ ID NO: 164775 - DNA, 20 bp, Homo sapiens
  source 1..20: mol_type = genomic DNA
cccttatttttacagtgaag

SEQ ID NO: 164776 - DNA, 20 bp, Homo sapiens
  source 1..20: mol_type = genomic DNA
ccttatttttacagtgaaga

SEQ ID NO: 164777 - DNA, 20 bp, Homo sapiens
  source 1..20: mol_type = genomic DNA
cttatttttacagtgaagaa

SEQ ID NO: 164778 - DNA, 20 bp, Homo sapiens
  source 1..20: mol_type = genomic DNA
ttatttttacagtgaagaag

SEQ ID NO: 164779 - DNA, 20 bp, Homo sapiens
  source 1..20: mol_type = genomic DNA
tatttttacagtgaagaagc

SEQ ID NO: 164780 - DNA, 20 bp, Homo sapiens
  source 1..20: mol_type = genomic DNA
atttttacagtgaagaagcc

SEQ ID NO: 164781 - DNA, 20 bp, Homo sapiens
  source 1..20: mol_type = genomic DNA
tttttacagtgaagaagcca

SEQ ID NO: 164782 - DNA, 20 bp, Homo sapiens
  source 1..20: mol_type = genomic DNA
ttttacagtgaagaagccaa

SEQ ID NO: 164783 - DNA, 20 bp, Homo sapiens
  source 1..20: mol_type = genomic DNA
tttacagtgaagaagccaaa

SEQ ID NO: 164784 - DNA, 20 bp, Homo sapiens
  source 1..20: mol_type = genomic DNA
ttacagtgaagaagccaaag

SEQ ID NO: 164785 - DNA, 20 bp, Homo sapiens
  source 1..20: mol_type = genomic DNA
tacagtgaagaagccaaagc

SEQ ID NO: 164786 - DNA, 20 bp, Homo sapiens
  source 1..20: mol_type = genomic DNA
acagtgaagaagccaaagcc

SEQ ID NO: 164787 - DNA, 20 bp, Homo sapiens
  source 1..20: mol_type = genomic DNA
cagtgaagaagccaaagccc

SEQ ID NO: 164788 - DNA, 20 bp, Homo sapiens
  source 1..20: mol_type = genomic DNA
agtgaagaagccaaagccca

SEQ ID NO: 164789 - DNA, 20 bp, Homo sapiens
  source 1..20: mol_type = genomic DNA
gtgaagaagccaaagcccag

SEQ ID NO: 164790 - DNA, 20 bp, Homo sapiens
  source 1..20: mol_type = genomic DNA
tgaagaagccaaagcccaga

SEQ ID NO: 164791 - DNA, 20 bp, Homo sapiens
  source 1..20: mol_type = genomic DNA
gaagaagccaaagcccagag

SEQ ID NO: 164792 - DNA, 20 bp, Homo sapiens
  source 1..20: mol_type = genomic DNA
aagaagccaaagcccagaga

SEQ ID NO: 164793 - DNA, 20 bp, Homo sapiens
  source 1..20: mol_type = genomic DNA
agaagccaaagcccagagaa

SEQ ID NO: 164794 - DNA, 20 bp, Homo sapiens
  source 1..20: mol_type = genomic DNA
gaagccaaagcccagagaag

SEQ ID NO: 164795 - DNA, 20 bp, Homo sapiens
  source 1..20: mol_type = genomic DNA
aagccaaagcccagagaagg

SEQ ID NO: 164796 - DNA, 20 bp, Homo sapiens
  source 1..20: mol_type = genomic DNA
agccaaagcccagagaaggg

SEQ ID NO: 164797 - DNA, 20 bp, Homo sapiens
  source 1..20: mol_type = genomic DNA
gccaaagcccagagaagggt

SEQ ID NO: 164798 - DNA, 20 bp, Homo sapiens
  source 1..20: mol_type = genomic DNA
ccaaagcccagagaagggtg

SEQ ID NO: 164799 - DNA, 20 bp, Homo sapiens
  source 1..20: mol_type = genomic DNA
caaagcccagagaagggtgt

SEQ ID NO: 164800 - DNA, 20 bp, Homo sapiens
  source 1..20: mol_type = genomic DNA
aaagcccagagaagggtgtt

SEQ ID NO: 164801 - DNA, 20 bp, Homo sapiens
  source 1..20: mol_type = genomic DNA
aagcccagagaagggtgtta

SEQ ID NO: 164802 - DNA, 20 bp, Homo sapiens
  source 1..20: mol_type = genomic DNA
agcccagagaagggtgttaa

SEQ ID NO: 164803 - DNA, 20 bp, Homo sapiens
  source 1..20: mol_type = genomic DNA
gcccagagaagggtgttaac

SEQ ID NO: 164804 - DNA, 20 bp, Homo sapiens
  source 1..20: mol_type = genomic DNA
cccagagaagggtgttaact

SEQ ID NO: 164805 - DNA, 20 bp, Homo sapiens
  source 1..20: mol_type = genomic DNA
ccagagaagggtgttaactt

SEQ ID NO: 164806 - DNA, 20 bp, Homo sapiens
  source 1..20: mol_type = genomic DNA
cagagaagggtgttaacttt

SEQ ID NO: 164807 - DNA, 20 bp, Homo sapiens
  source 1..20: mol_type = genomic DNA
agagaagggtgttaacttta

SEQ ID NO: 164808 - DNA, 20 bp, Homo sapiens
  source 1..20: mol_type = genomic DNA
gagaagggtgttaactttac

SEQ ID NO: 164809 - DNA, 20 bp, Homo sapiens
  source 1..20: mol_type = genomic DNA
agaagggtgttaactttaca

SEQ ID NO: 164810 - DNA, 20 bp, Homo sapiens
  source 1..20: mol_type = genomic DNA
gaagggtgttaactttacaa

SEQ ID NO: 164811 - DNA, 20 bp, Homo sapiens
  source 1..20: mol_type = genomic DNA
aagggtgttaactttacaag

SEQ ID NO: 164812 - DNA, 20 bp, Homo sapiens
  source 1..20: mol_type = genomic DNA
agggtgttaactttacaagt

SEQ ID NO: 164813 - DNA, 20 bp, Homo sapiens
  source 1..20: mol_type = genomic DNA
gggtgttaactttacaagtg

SEQ ID NO: 164814 - DNA, 20 bp, Homo sapiens
  source 1..20: mol_type = genomic DNA
ggtgttaactttacaagtgt

SEQ ID NO: 164815 - DNA, 20 bp, Homo sapiens
  source 1..20: mol_type = genomic DNA
gtgttaactttacaagtgtc

SEQ ID NO: 164816 - DNA, 20 bp, Homo sapiens
  source 1..20: mol_type = genomic DNA
tgttaactttacaagtgtca

SEQ ID NO: 164817 - DNA, 20 bp, Homo sapiens
  source 1..20: mol_type = genomic DNA
gttaactttacaagtgtcag

SEQ ID NO: 164818 - DNA, 20 bp, Homo sapiens
  source 1..20: mol_type = genomic DNA
ttaactttacaagtgtcaga

SEQ ID NO: 164819 - DNA, 20 bp, Homo sapiens
  source 1..20: mol_type = genomic DNA
taactttacaagtgtcagac

SEQ ID NO: 164820 - DNA, 20 bp, Homo sapiens
  source 1..20: mol_type = genomic DNA
aactttacaagtgtcagaca

SEQ ID NO: 164821 - DNA, 20 bp, Homo sapiens
  source 1..20: mol_type = genomic DNA
actttacaagtgtcagacag

SEQ ID NO: 164822 - DNA, 20 bp, Homo sapiens
  source 1..20: mol_type = genomic DNA
ctttacaagtgtcagacagt

SEQ ID NO: 164823 - DNA, 20 bp, Homo sapiens
  source 1..20: mol_type = genomic DNA
tttacaagtgtcagacagta

SEQ ID NO: 164824 - DNA, 20 bp, Homo sapiens
  source 1..20: mol_type = genomic DNA
ttacaagtgtcagacagtag

SEQ ID NO: 164825 - DNA, 20 bp, Homo sapiens
  source 1..20: mol_type = genomic DNA
tacaagtgtcagacagtagt

SEQ ID NO: 164826 - DNA, 20 bp, Homo sapiens
  source 1..20: mol_type = genomic DNA
acaagtgtcagacagtagtt

SEQ ID NO: 164827 - DNA, 20 bp, Homo sapiens
  source 1..20: mol_type = genomic DNA
caagtgtcagacagtagtta

SEQ ID NO: 164828 - DNA, 20 bp, Homo sapiens
  source 1..20: mol_type = genomic DNA
aagtgtcagacagtagttag

SEQ ID NO: 164829 - DNA, 20 bp, Homo sapiens
  source 1..20: mol_type = genomic DNA
agtgtcagacagtagttaga

SEQ ID NO: 164830 - DNA, 20 bp, Homo sapiens
  source 1..20: mol_type = genomic DNA
gtgtcagacagtagttagaa

SEQ ID NO: 164831 - DNA, 20 bp, Homo sapiens
  source 1..20: mol_type = genomic DNA
tgtcagacagtagttagaac

SEQ ID NO: 164832 - DNA, 20 bp, Homo sapiens
  source 1..20: mol_type = genomic DNA
gtcagacagtagttagaact

SEQ ID NO: 164833 - DNA, 20 bp, Homo sapiens
  source 1..20: mol_type = genomic DNA
tcagacagtagttagaactt

SEQ ID NO: 164834 - DNA, 20 bp, Homo sapiens
  source 1..20: mol_type = genomic DNA
cagacagtagttagaacttg

SEQ ID NO: 164835 - DNA, 20 bp, Homo sapiens
  source 1..20: mol_type = genomic DNA
agacagtagttagaacttgg

SEQ ID NO: 164836 - DNA, 20 bp, Homo sapiens
  source 1..20: mol_type = genomic DNA
gacagtagttagaacttggt

SEQ ID NO: 164837 - DNA, 20 bp, Homo sapiens
  source 1..20: mol_type = genomic DNA
acagtagttagaacttggtg

SEQ ID NO: 164838 - DNA, 20 bp, Homo sapiens
  source 1..20: mol_type = genomic DNA
cagtagttagaacttggtgg

SEQ ID NO: 164839 - DNA, 20 bp, Homo sapiens
  source 1..20: mol_type = genomic DNA
agtagttagaacttggtggg

SEQ ID NO: 164840 - DNA, 20 bp, Homo sapiens
  source 1..20: mol_type = genomic DNA
gtagttagaacttggtgggg

SEQ ID NO: 164841 - DNA, 20 bp, Homo sapiens
  source 1..20: mol_type = genomic DNA
tagttagaacttggtggggt

SEQ ID NO: 164842 - DNA, 20 bp, Homo sapiens
  source 1..20: mol_type = genomic DNA
agttagaacttggtggggtt

SEQ ID NO: 164843 - DNA, 20 bp, Homo sapiens
  source 1..20: mol_type = genomic DNA
gttagaacttggtggggttt

SEQ ID NO: 164844 - DNA, 20 bp, Homo sapiens
  source 1..20: mol_type = genomic DNA
ttagaacttggtggggtttt

SEQ ID NO: 164845 - DNA, 20 bp, Homo sapiens
  source 1..20: mol_type = genomic DNA
tagaacttggtggggttttt

SEQ ID NO: 164846 - DNA, 20 bp, Homo sapiens
  source 1..20: mol_type = genomic DNA
agaacttggtggggtttttt

SEQ ID NO: 164847 - DNA, 20 bp, Homo sapiens
  source 1..20: mol_type = genomic DNA
gaacttggtggggttttttt

SEQ ID NO: 164848 - DNA, 20 bp, Homo sapiens
  source 1..20: mol_type = genomic DNA
aacttggtggggtttttttt

SEQ ID NO: 164849 - DNA, 20 bp, Homo sapiens
  source 1..20: mol_type = genomic DNA
acttggtggggttttttttt

SEQ ID NO: 164850 - DNA, 20 bp, Homo sapiens
  source 1..20: mol_type = genomic DNA
cttggtggggtttttttttt

SEQ ID NO: 164851 - DNA, 20 bp, Homo sapiens
  source 1..20: mol_type = genomic DNA
ttggtggggttttttttttt

SEQ ID NO: 164852 - DNA, 20 bp, Homo sapiens
  source 1..20: mol_type = genomic DNA
tggtggggtttttttttttt

SEQ ID NO: 164853 - DNA, 20 bp, Homo sapiens
  source 1..20: mol_type = genomic DNA
ggtggggttttttttttttt

SEQ ID NO: 164854 - DNA, 20 bp, Homo sapiens
  source 1..20: mol_type = genomic DNA
gtggggtttttttttttttt

SEQ ID NO: 164855 - DNA, 20 bp, Homo sapiens
  source 1..20: mol_type = genomic DNA
tggggttttttttttttttt

SEQ ID NO: 164856 - DNA, 20 bp, Homo sapiens
  source 1..20: mol_type = genomic DNA
ggggtttttttttttttttt

SEQ ID NO: 164857 - DNA, 20 bp, Homo sapiens
  source 1..20: mol_type = genomic DNA
gggttttttttttttttttt

SEQ ID NO: 164858 - DNA, 20 bp, Homo sapiens
  source 1..20: mol_type = genomic DNA
ggtttttttttttttttttt

SEQ ID NO: 164859 - DNA, 20 bp, Homo sapiens
  source 1..20: mol_type = genomic DNA
gttttttttttttttttttt

SEQ ID NO: 164860 - DNA, 20 bp, Homo sapiens
  source 1..20: mol_type = genomic DNA
tttttttttttttttttttg

SEQ ID NO: 164861 - DNA, 20 bp, Homo sapiens
  source 1..20: mol_type = genomic DNA
ttttttttttttttttttga

SEQ ID NO: 164862 - DNA, 20 bp, Homo sapiens
  source 1..20: mol_type = genomic DNA
tttttttttttttttttgag

SEQ ID NO: 164863 - DNA, 20 bp, Homo sapiens
  source 1..20: mol_type = genomic DNA
ttttttttttttttttgaga

SEQ ID NO: 164864 - DNA, 20 bp, Homo sapiens
  source 1..20: mol_type = genomic DNA
tttttttttttttttgagat

SEQ ID NO: 164865 - DNA, 20 bp, Homo sapiens
  source 1..20: mol_type = genomic DNA
ttttttttttttttgagatg

SEQ ID NO: 164866 - DNA, 20 bp, Homo sapiens
  source 1..20: mol_type = genomic DNA
tttttttttttttgagatgg

SEQ ID NO: 164867 - DNA, 20 bp, Homo sapiens
  source 1..20: mol_type = genomic DNA
ttttttttttttgagatgga

SEQ ID NO: 164868 - DNA, 20 bp, Homo sapiens
  source 1..20: mol_type = genomic DNA
tttttttttttgagatggag

SEQ ID NO: 164869 - DNA, 20 bp, Homo sapiens
  source 1..20: mol_type = genomic DNA
ttttttttttgagatggagt

SEQ ID NO: 164870 - DNA, 20 bp, Homo sapiens
  source 1..20: mol_type = genomic DNA
tttttttttgagatggagtc

SEQ ID NO: 164871 - DNA, 20 bp, Homo sapiens
  source 1..20: mol_type = genomic DNA
ttttttttgagatggagtct

SEQ ID NO: 164872 - DNA, 20 bp, Homo sapiens
  source 1..20: mol_type = genomic DNA
tttttttgagatggagtctt

SEQ ID NO: 164873 - DNA, 20 bp, Homo sapiens
  source 1..20: mol_type = genomic DNA
ttttttgagatggagtcttg

SEQ ID NO: 164874 - DNA, 20 bp, Homo sapiens
  source 1..20: mol_type = genomic DNA
tttttgagatggagtcttgc

SEQ ID NO: 164875 - DNA, 20 bp, Homo sapiens
  source 1..20: mol_type = genomic DNA
ttttgagatggagtcttgct

SEQ ID NO: 164876 - DNA, 20 bp, Homo sapiens
  source 1..20: mol_type = genomic DNA
tttgagatggagtcttgctc

SEQ ID NO: 164877 - DNA, 20 bp, Homo sapiens
  source 1..20: mol_type = genomic DNA
ttgagatggagtcttgctct

SEQ ID NO: 164878 - DNA, 20 bp, Homo sapiens
  source 1..20: mol_type = genomic DNA
tgagatggagtcttgctctg

SEQ ID NO: 164879 - DNA, 20 bp, Homo sapiens
  source 1..20: mol_type = genomic DNA
gagatggagtcttgctctgt

SEQ ID NO: 164880 - DNA, 20 bp, Homo sapiens
  source 1..20: mol_type = genomic DNA
agatggagtcttgctctgtt

SEQ ID NO: 164881 - DNA, 20 bp, Homo sapiens
  source 1..20: mol_type = genomic DNA
gatggagtcttgctctgttg

SEQ ID NO: 164882 - DNA, 20 bp, Homo sapiens
  source 1..20: mol_type = genomic DNA
atggagtcttgctctgttgc

SEQ ID NO: 164883 - DNA, 20 bp, Homo sapiens
  source 1..20: mol_type = genomic DNA
tggagtcttgctctgttgcc

SEQ ID NO: 164884 - DNA, 20 bp, Homo sapiens
  source 1..20: mol_type = genomic DNA
ggagtcttgctctgttgccc

SEQ ID NO: 164885 - DNA, 20 bp, Homo sapiens
  source 1..20: mol_type = genomic DNA
gagtcttgctctgttgccca

SEQ ID NO: 164886 - DNA, 20 bp, Homo sapiens
  source 1..20: mol_type = genomic DNA
agtcttgctctgttgcccag

SEQ ID NO: 164887 - DNA, 20 bp, Homo sapiens
  source 1..20: mol_type = genomic DNA
gtcttgctctgttgcccagg

SEQ ID NO: 164888 - DNA, 20 bp, Homo sapiens
  source 1..20: mol_type = genomic DNA
tcttgctctgttgcccaggc

SEQ ID NO: 164889 - DNA, 20 bp, Homo sapiens
  source 1..20: mol_type = genomic DNA
cttgctctgttgcccaggct

SEQ ID NO: 164890 - DNA, 20 bp, Homo sapiens
  source 1..20: mol_type = genomic DNA
ttgctctgttgcccaggctg

SEQ ID NO: 164891 - DNA, 20 bp, Homo sapiens
  source 1..20: mol_type = genomic DNA
tgctctgttgcccaggctgg

SEQ ID NO: 164892 - DNA, 20 bp, Homo sapiens
  source 1..20: mol_type = genomic DNA
gctctgttgcccaggctgga

SEQ ID NO: 164893 - DNA, 20 bp, Homo sapiens
  source 1..20: mol_type = genomic DNA
ctctgttgcccaggctggag

SEQ ID NO: 164894 - DNA, 20 bp, Homo sapiens
  source 1..20: mol_type = genomic DNA
tctgttgcccaggctggagt

SEQ ID NO: 164895 - DNA, 20 bp, Homo sapiens
  source 1..20: mol_type = genomic DNA
ctgttgcccaggctggagtg

SEQ ID NO: 164896 - DNA, 20 bp, Homo sapiens
  source 1..20: mol_type = genomic DNA
tgttgcccaggctggagtgc

SEQ ID NO: 164897 - DNA, 20 bp, Homo sapiens
  source 1..20: mol_type = genomic DNA
gttgcccaggctggagtgca

SEQ ID NO: 164898 - DNA, 20 bp, Homo sapiens
  source 1..20: mol_type = genomic DNA
ttgcccaggctggagtgcag

SEQ ID NO: 164899 - DNA, 20 bp, Homo sapiens
  source 1..20: mol_type = genomic DNA
tgcccaggctggagtgcagt

SEQ ID NO: 164900 - DNA, 20 bp, Homo sapiens
  source 1..20: mol_type = genomic DNA
gcccaggctggagtgcagtg

SEQ ID NO: 164901 - DNA, 20 bp, Homo sapiens
  source 1..20: mol_type = genomic DNA
cccaggctggagtgcagtgg

SEQ ID NO: 164902 - DNA, 20 bp, Homo sapiens
  source 1..20: mol_type = genomic DNA
ccaggctggagtgcagtggt

SEQ ID NO: 164903 - DNA, 20 bp, Homo sapiens
  source 1..20: mol_type = genomic DNA
caggctggagtgcagtggtg

SEQ ID NO: 164904 - DNA, 20 bp, Homo sapiens
  source 1..20: mol_type = genomic DNA
aggctggagtgcagtggtgc

SEQ ID NO: 164905 - DNA, 20 bp, Homo sapiens
  source 1..20: mol_type = genomic DNA
ggctggagtgcagtggtgcg

SEQ ID NO: 164906 - DNA, 20 bp, Homo sapiens
  source 1..20: mol_type = genomic DNA
gctggagtgcagtggtgcga

SEQ ID NO: 164907 - DNA, 20 bp, Homo sapiens
  source 1..20: mol_type = genomic DNA
ctggagtgcagtggtgcgat

SEQ ID NO: 164908 - DNA, 20 bp, Homo sapiens
  source 1..20: mol_type = genomic DNA
tggagtgcagtggtgcgatc

SEQ ID NO: 164909 - DNA, 20 bp, Homo sapiens
  source 1..20: mol_type = genomic DNA
ggagtgcagtggtgcgatct

SEQ ID NO: 164910 - DNA, 20 bp, Homo sapiens
  source 1..20: mol_type = genomic DNA
gagtgcagtggtgcgatctc

SEQ ID NO: 164911 - DNA, 20 bp, Homo sapiens
  source 1..20: mol_type = genomic DNA
agtgcagtggtgcgatctca

SEQ ID NO: 164912 - DNA, 20 bp, Homo sapiens
  source 1..20: mol_type = genomic DNA
gtgcagtggtgcgatctcag

SEQ ID NO: 164913 - DNA, 20 bp, Homo sapiens
  source 1..20: mol_type = genomic DNA
tgcagtggtgcgatctcagc

SEQ ID NO: 164914 - DNA, 20 bp, Homo sapiens
  source 1..20: mol_type = genomic DNA
gcagtggtgcgatctcagct

SEQ ID NO: 164915 - DNA, 20 bp, Homo sapiens
  source 1..20: mol_type = genomic DNA
cagtggtgcgatctcagctc

SEQ ID NO: 164916 - DNA, 20 bp, Homo sapiens
  source 1..20: mol_type = genomic DNA
agtggtgcgatctcagctca

SEQ ID NO: 164917 - DNA, 20 bp, Homo sapiens
  source 1..20: mol_type = genomic DNA
gtggtgcgatctcagctcac

SEQ ID NO: 164918 - DNA, 20 bp, Homo sapiens
  source 1..20: mol_type = genomic DNA
tggtgcgatctcagctcact

SEQ ID NO: 164919 - DNA, 20 bp, Homo sapiens
  source 1..20: mol_type = genomic DNA
ggtgcgatctcagctcactg

SEQ ID NO: 164920 - DNA, 20 bp, Homo sapiens
  source 1..20: mol_type = genomic DNA
gtgcgatctcagctcactgc

SEQ ID NO: 164921 - DNA, 20 bp, Homo sapiens
  source 1..20: mol_type = genomic DNA
tgcgatctcagctcactgca

SEQ ID NO: 164922 - DNA, 20 bp, Homo sapiens
  source 1..20: mol_type = genomic DNA
gcgatctcagctcactgcaa

SEQ ID NO: 164923 - DNA, 20 bp, Homo sapiens
  source 1..20: mol_type = genomic DNA
cgatctcagctcactgcaac

SEQ ID NO: 164924 - DNA, 20 bp, Homo sapiens
  source 1..20: mol_type = genomic DNA
gatctcagctcactgcaacc

SEQ ID NO: 164925 - DNA, 20 bp, Homo sapiens
  source 1..20: mol_type = genomic DNA
atctcagctcactgcaacct

SEQ ID NO: 164926 - DNA, 20 bp, Homo sapiens
  source 1..20: mol_type = genomic DNA
tctcagctcactgcaacctc

SEQ ID NO: 164927 - DNA, 20 bp, Homo sapiens
  source 1..20: mol_type = genomic DNA
ctcagctcactgcaacctct

SEQ ID NO: 164928 - DNA, 20 bp, Homo sapiens
  source 1..20: mol_type = genomic DNA
tcagctcactgcaacctctg

SEQ ID NO: 164929 - DNA, 20 bp, Homo sapiens
  source 1..20: mol_type = genomic DNA
cagctcactgcaacctctgc

SEQ ID NO: 164930 - DNA, 20 bp, Homo sapiens
  source 1..20: mol_type = genomic DNA
agctcactgcaacctctgcc

SEQ ID NO: 164931 - DNA, 20 bp, Homo sapiens
  source 1..20: mol_type = genomic DNA
gctcactgcaacctctgcct

SEQ ID NO: 164932 - DNA, 20 bp, Homo sapiens
  source 1..20: mol_type = genomic DNA
ctcactgcaacctctgcctc

SEQ ID NO: 164933 - DNA, 20 bp, Homo sapiens
  source 1..20: mol_type = genomic DNA
tcactgcaacctctgcctcc

SEQ ID NO: 164934 - DNA, 20 bp, Homo sapiens
  source 1..20: mol_type = genomic DNA
cactgcaacctctgcctccc

SEQ ID NO: 164935 - DNA, 20 bp, Homo sapiens
  source 1..20: mol_type = genomic DNA
actgcaacctctgcctccca

SEQ ID NO: 164936 - DNA, 20 bp, Homo sapiens
  source 1..20: mol_type = genomic DNA
ctgcaacctctgcctcccag

SEQ ID NO: 164937 - DNA, 20 bp, Homo sapiens
  source 1..20: mol_type = genomic DNA
tgcaacctctgcctcccagg

SEQ ID NO: 164938 - DNA, 20 bp, Homo sapiens
  source 1..20: mol_type = genomic DNA
gcaacctctgcctcccaggt

SEQ ID NO: 164939 - DNA, 20 bp, Homo sapiens
  source 1..20: mol_type = genomic DNA
caacctctgcctcccaggtt

SEQ ID NO: 164940 - DNA, 20 bp, Homo sapiens
  source 1..20: mol_type = genomic DNA
aacctctgcctcccaggttc

SEQ ID NO: 164941 - DNA, 20 bp, Homo sapiens
  source 1..20: mol_type = genomic DNA
acctctgcctcccaggttca

SEQ ID NO: 164942 - DNA, 20 bp, Homo sapiens
  source 1..20: mol_type = genomic DNA
cctctgcctcccaggttcaa

SEQ ID NO: 164943 - DNA, 20 bp, Homo sapiens
  source 1..20: mol_type = genomic DNA
ctctgcctcccaggttcaag

SEQ ID NO: 164944 - DNA, 20 bp, Homo sapiens
  source 1..20: mol_type = genomic DNA
tctgcctcccaggttcaagc

SEQ ID NO: 164945 - DNA, 20 bp, Homo sapiens
  source 1..20: mol_type = genomic DNA
ctgcctcccaggttcaagcg

SEQ ID NO: 164946 - DNA, 20 bp, Homo sapiens
  source 1..20: mol_type = genomic DNA
tgcctcccaggttcaagcga

SEQ ID NO: 164947 - DNA, 20 bp, Homo sapiens
  source 1..20: mol_type = genomic DNA
gcctcccaggttcaagcgat

SEQ ID NO: 164948 - DNA, 20 bp, Homo sapiens
  source 1..20: mol_type = genomic DNA
cctcccaggttcaagcgatt

SEQ ID NO: 164949 - DNA, 20 bp, Homo sapiens
  source 1..20: mol_type = genomic DNA
ctcccaggttcaagcgattc

SEQ ID NO: 164950 - DNA, 20 bp, Homo sapiens
  source 1..20: mol_type = genomic DNA
tcccaggttcaagcgattct

SEQ ID NO: 164951 - DNA, 20 bp, Homo sapiens
  source 1..20: mol_type = genomic DNA
cccaggttcaagcgattctc

SEQ ID NO: 164952 - DNA, 20 bp, Homo sapiens
  source 1..20: mol_type = genomic DNA
ccaggttcaagcgattctcc

SEQ ID NO: 164953 - DNA, 20 bp, Homo sapiens
  source 1..20: mol_type = genomic DNA
caggttcaagcgattctcct

SEQ ID NO: 164954 - DNA, 20 bp, Homo sapiens
  source 1..20: mol_type = genomic DNA
aggttcaagcgattctcctg

SEQ ID NO: 164955 - DNA, 20 bp, Homo sapiens
  source 1..20: mol_type = genomic DNA
ggttcaagcgattctcctgc

SEQ ID NO: 164956 - DNA, 20 bp, Homo sapiens
  source 1..20: mol_type = genomic DNA
gttcaagcgattctcctgcc

SEQ ID NO: 164957 - DNA, 20 bp, Homo sapiens
  source 1..20: mol_type = genomic DNA
ttcaagcgattctcctgcct

SEQ ID NO: 164958 - DNA, 20 bp, Homo sapiens
  source 1..20: mol_type = genomic DNA
tcaagcgattctcctgcctc

SEQ ID NO: 164959 - DNA, 20 bp, Homo sapiens
  source 1..20: mol_type = genomic DNA
caagcgattctcctgcctca

SEQ ID NO: 164960 - DNA, 20 bp, Homo sapiens
  source 1..20: mol_type = genomic DNA
aagcgattctcctgcctcag

SEQ ID NO: 164961 - DNA, 20 bp, Homo sapiens
  source 1..20: mol_type = genomic DNA
agcgattctcctgcctcagc

SEQ ID NO: 164962 - DNA, 20 bp, Homo sapiens
  source 1..20: mol_type = genomic DNA
gcgattctcctgcctcagcc

SEQ ID NO: 164963 - DNA, 20 bp, Homo sapiens
  source 1..20: mol_type = genomic DNA
cgattctcctgcctcagcct

SEQ ID NO: 164964 - DNA, 20 bp, Homo sapiens
  source 1..20: mol_type = genomic DNA
gattctcctgcctcagccta

SEQ ID NO: 164965 - DNA, 20 bp, Homo sapiens
  source 1..20: mol_type = genomic DNA
attctcctgcctcagcctac

SEQ ID NO: 164966 - DNA, 20 bp, Homo sapiens
  source 1..20: mol_type = genomic DNA
ttctcctgcctcagcctact

SEQ ID NO: 164967 - DNA, 20 bp, Homo sapiens
  source 1..20: mol_type = genomic DNA
tctcctgcctcagcctacta

SEQ ID NO: 164968 - DNA, 20 bp, Homo sapiens
  source 1..20: mol_type = genomic DNA
ctcctgcctcagcctactaa

SEQ ID NO: 164969 - DNA, 20 bp, Homo sapiens
  source 1..20: mol_type = genomic DNA
tcctgcctcagcctactaag

SEQ ID NO: 164970 - DNA, 20 bp, Homo sapiens
  source 1..20: mol_type = genomic DNA
cctgcctcagcctactaagt

SEQ ID NO: 164971 - DNA, 20 bp, Homo sapiens
  source 1..20: mol_type = genomic DNA
ctgcctcagcctactaagta

SEQ ID NO: 164972 - DNA, 20 bp, Homo sapiens
  source 1..20: mol_type = genomic DNA
tgcctcagcctactaagtag

SEQ ID NO: 164973 - DNA, 20 bp, Homo sapiens
  source 1..20: mol_type = genomic DNA
gcctcagcctactaagtagc

SEQ ID NO: 164974 - DNA, 20 bp, Homo sapiens
  source 1..20: mol_type = genomic DNA
cctcagcctactaagtagct

SEQ ID NO: 164975 - DNA, 20 bp, Homo sapiens
  source 1..20: mol_type = genomic DNA
ctcagcctactaagtagctg

SEQ ID NO: 164976 - DNA, 20 bp, Homo sapiens
  source 1..20: mol_type = genomic DNA
tcagcctactaagtagctgg

SEQ ID NO: 164977 - DNA, 20 bp, Homo sapiens
  source 1..20: mol_type = genomic DNA
cagcctactaagtagctggg

SEQ ID NO: 164978 - DNA, 20 bp, Homo sapiens
  source 1..20: mol_type = genomic DNA
agcctactaagtagctggga

SEQ ID NO: 164979 - DNA, 20 bp, Homo sapiens
  source 1..20: mol_type = genomic DNA
gcctactaagtagctgggac

SEQ ID NO: 164980 - DNA, 20 bp, Homo sapiens
  source 1..20: mol_type = genomic DNA
cctactaagtagctgggact

SEQ ID NO: 164981 - DNA, 20 bp, Homo sapiens
  source 1..20: mol_type = genomic DNA
ctactaagtagctgggacta

SEQ ID NO: 164982 - DNA, 20 bp, Homo sapiens
  source 1..20: mol_type = genomic DNA
tactaagtagctgggactat

SEQ ID NO: 164983 - DNA, 20 bp, Homo sapiens
  source 1..20: mol_type = genomic DNA
actaagtagctgggactata

SEQ ID NO: 164984 - DNA, 20 bp, Homo sapiens
  source 1..20: mol_type = genomic DNA
ctaagtagctgggactatag

SEQ ID NO: 164985 - DNA, 20 bp, Homo sapiens
  source 1..20: mol_type = genomic DNA
taagtagctgggactatagg

SEQ ID NO: 164986 - DNA, 20 bp, Homo sapiens
  source 1..20: mol_type = genomic DNA
aagtagctgggactataggt

SEQ ID NO: 164987 - DNA, 20 bp, Homo sapiens
  source 1..20: mol_type = genomic DNA
agtagctgggactataggtg

SEQ ID NO: 164988 - DNA, 20 bp, Homo sapiens
  source 1..20: mol_type = genomic DNA
gtagctgggactataggtgc

SEQ ID NO: 164989 - DNA, 20 bp, Homo sapiens
  source 1..20: mol_type = genomic DNA
tagctgggactataggtgcg

SEQ ID NO: 164990 - DNA, 20 bp, Homo sapiens
  source 1..20: mol_type = genomic DNA
agctgggactataggtgcgc

SEQ ID NO: 164991 - DNA, 20 bp, Homo sapiens
  source 1..20: mol_type = genomic DNA
gctgggactataggtgcgca

SEQ ID NO: 164992 - DNA, 20 bp, Homo sapiens
  source 1..20: mol_type = genomic DNA
ctgggactataggtgcgcac

SEQ ID NO: 164993 - DNA, 20 bp, Homo sapiens
  source 1..20: mol_type = genomic DNA
tgggactataggtgcgcacc

SEQ ID NO: 164994 - DNA, 20 bp, Homo sapiens
  source 1..20: mol_type = genomic DNA
gggactataggtgcgcacca

SEQ ID NO: 164995 - DNA, 20 bp, Homo sapiens
  source 1..20: mol_type = genomic DNA
ggactataggtgcgcaccac

SEQ ID NO: 164996 - DNA, 20 bp, Homo sapiens
  source 1..20: mol_type = genomic DNA
gactataggtgcgcaccacc

SEQ ID NO: 164997 - DNA, 20 bp, Homo sapiens
  source 1..20: mol_type = genomic DNA
actataggtgcgcaccacca

SEQ ID NO: 164998 - DNA, 20 bp, Homo sapiens
  source 1..20: mol_type = genomic DNA
ctataggtgcgcaccaccac

SEQ ID NO: 164999 - DNA, 20 bp, Homo sapiens
  source 1..20: mol_type = genomic DNA
tataggtgcgcaccaccacg

SEQ ID NO: 165000 - DNA, 20 bp, Homo sapiens
  source 1..20: mol_type = genomic DNA
ataggtgcgcaccaccacgc

SEQ ID NO: 165001 - DNA, 20 bp, Homo sapiens
  source 1..20: mol_type = genomic DNA
taggtgcgcaccaccacgcc

SEQ ID NO: 165002 - DNA, 20 bp, Homo sapiens
  source 1..20: mol_type = genomic DNA
aggtgcgcaccaccacgcct

SEQ ID NO: 165003 - DNA, 20 bp, Homo sapiens
  source 1..20: mol_type = genomic DNA
ggtgcgcaccaccacgccta

SEQ ID NO: 165004 - DNA, 20 bp, Homo sapiens
  source 1..20: mol_type = genomic DNA
gtgcgcaccaccacgcctag

SEQ ID NO: 165005 - DNA, 20 bp, Homo sapiens
  source 1..20: mol_type = genomic DNA
tgcgcaccaccacgcctagc

SEQ ID NO: 165006 - DNA, 20 bp, Homo sapiens
  source 1..20: mol_type = genomic DNA
gcgcaccaccacgcctagct

SEQ ID NO: 165007 - DNA, 20 bp, Homo sapiens
  source 1..20: mol_type = genomic DNA
cgcaccaccacgcctagcta

SEQ ID NO: 165008 - DNA, 20 bp, Homo sapiens
  source 1..20: mol_type = genomic DNA
gcaccaccacgcctagctaa

SEQ ID NO: 165009 - DNA, 20 bp, Homo sapiens
  source 1..20: mol_type = genomic DNA
caccaccacgcctagctaat

SEQ ID NO: 165010 - DNA, 20 bp, Homo sapiens
  source 1..20: mol_type = genomic DNA
accaccacgcctagctaatt

SEQ ID NO: 165011 - DNA, 20 bp, Homo sapiens
  source 1..20: mol_type = genomic DNA
ccaccacgcctagctaattt

SEQ ID NO: 165012 - DNA, 20 bp, Homo sapiens
  source 1..20: mol_type = genomic DNA
caccacgcctagctaatttt

SEQ ID NO: 165013 - DNA, 20 bp, Homo sapiens
  source 1..20: mol_type = genomic DNA
accacgcctagctaattttt

SEQ ID NO: 165014 - DNA, 20 bp, Homo sapiens
  source 1..20: mol_type = genomic DNA
ccacgcctagctaatttttg

SEQ ID NO: 165015 - DNA, 20 bp, Homo sapiens
  source 1..20: mol_type = genomic DNA
cacgcctagctaatttttgt

SEQ ID NO: 165016 - DNA, 20 bp, Homo sapiens
  source 1..20: mol_type = genomic DNA
acgcctagctaatttttgta

SEQ ID NO: 165017 - DNA, 20 bp, Homo sapiens
  source 1..20: mol_type = genomic DNA
cgcctagctaatttttgtat

SEQ ID NO: 165018 - DNA, 20 bp, Homo sapiens
  source 1..20: mol_type = genomic DNA
gcctagctaatttttgtatt

SEQ ID NO: 165019 - DNA, 20 bp, Homo sapiens
  source 1..20: mol_type = genomic DNA
cctagctaatttttgtattt

SEQ ID NO: 165020 - DNA, 20 bp, Homo sapiens
  source 1..20: mol_type = genomic DNA
ctagctaatttttgtatttt

SEQ ID NO: 165021 - DNA, 20 bp, Homo sapiens
  source 1..20: mol_type = genomic DNA
tagctaatttttgtattttt

SEQ ID NO: 165022 - DNA, 20 bp, Homo sapiens
  source 1..20: mol_type = genomic DNA
agctaatttttgtatttttt

SEQ ID NO: 165023 - DNA, 20 bp, Homo sapiens
  source 1..20: mol_type = genomic DNA
gctaatttttgtattttttc

SEQ ID NO: 165024 - DNA, 20 bp, Homo sapiens
  source 1..20: mol_type = genomic DNA
ctaatttttgtattttttca

SEQ ID NO: 165025 - DNA, 20 bp, Homo sapiens
  source 1..20: mol_type = genomic DNA
taatttttgtattttttcag

SEQ ID NO: 165026 - DNA, 20 bp, Homo sapiens
  source 1..20: mol_type = genomic DNA
aatttttgtattttttcagt

SEQ ID NO: 165027 - DNA, 20 bp, Homo sapiens
  source 1..20: mol_type = genomic DNA
atttttgtattttttcagta

SEQ ID NO: 165028 - DNA, 20 bp, Homo sapiens
  source 1..20: mol_type = genomic DNA
tttttgtattttttcagtag

SEQ ID NO: 165029 - DNA, 20 bp, Homo sapiens
  source 1..20: mol_type = genomic DNA
ttttgtattttttcagtaga

SEQ ID NO: 165030 - DNA, 20 bp, Homo sapiens
  source 1..20: mol_type = genomic DNA
tttgtattttttcagtagag

SEQ ID NO: 165031 - DNA, 20 bp, Homo sapiens
  source 1..20: mol_type = genomic DNA
ttgtattttttcagtagaga

SEQ ID NO: 165032 - DNA, 20 bp, Homo sapiens
  source 1..20: mol_type = genomic DNA
tgtattttttcagtagagac

SEQ ID NO: 165033 - DNA, 20 bp, Homo sapiens
  source 1..20: mol_type = genomic DNA
gtattttttcagtagagaca

SEQ ID NO: 165034 - DNA, 20 bp, Homo sapiens
  source 1..20: mol_type = genomic DNA
tattttttcagtagagacag

SEQ ID NO: 165035 - DNA, 20 bp, Homo sapiens
  source 1..20: mol_type = genomic DNA
attttttcagtagagacagg

SEQ ID NO: 165036 - DNA, 20 bp, Homo sapiens
  source 1..20: mol_type = genomic DNA
ttttttcagtagagacaggg

SEQ ID NO: 165037 - DNA, 20 bp, Homo sapiens
  source 1..20: mol_type = genomic DNA
tttttcagtagagacagggt

SEQ ID NO: 165038 - DNA, 20 bp, Homo sapiens
  source 1..20: mol_type = genomic DNA
ttttcagtagagacagggtt

SEQ ID NO: 165039 - DNA, 20 bp, Homo sapiens
  source 1..20: mol_type = genomic DNA
tttcagtagagacagggttt

SEQ ID NO: 165040 - DNA, 20 bp, Homo sapiens
  source 1..20: mol_type = genomic DNA
ttcagtagagacagggtttt

SEQ ID NO: 165041 - DNA, 20 bp, Homo sapiens
  source 1..20: mol_type = genomic DNA
tcagtagagacagggttttg

SEQ ID NO: 165042 - DNA, 20 bp, Homo sapiens
  source 1..20: mol_type = genomic DNA
cagtagagacagggttttgc

SEQ ID NO: 165043 - DNA, 20 bp, Homo sapiens
  source 1..20: mol_type = genomic DNA
agtagagacagggttttgct

SEQ ID NO: 165044 - DNA, 20 bp, Homo sapiens
  source 1..20: mol_type = genomic DNA
gtagagacagggttttgcta

SEQ ID NO: 165045 - DNA, 20 bp, Homo sapiens
  source 1..20: mol_type = genomic DNA
tagagacagggttttgctat

SEQ ID NO: 165046 - DNA, 20 bp, Homo sapiens
  source 1..20: mol_type = genomic DNA
agagacagggttttgctatg

SEQ ID NO: 165047 - DNA, 20 bp, Homo sapiens
  source 1..20: mol_type = genomic DNA
gagacagggttttgctatgc

SEQ ID NO: 165048 - DNA, 20 bp, Homo sapiens
  source 1..20: mol_type = genomic DNA
agacagggttttgctatgct

SEQ ID NO: 165049 - DNA, 20 bp, Homo sapiens
  source 1..20: mol_type = genomic DNA
gacagggttttgctatgctg

SEQ ID NO: 165050 - DNA, 20 bp, Homo sapiens
  source 1..20: mol_type = genomic DNA
acagggttttgctatgctgg

SEQ ID NO: 165051 - DNA, 20 bp, Homo sapiens
  source 1..20: mol_type = genomic DNA
cagggttttgctatgctggc

SEQ ID NO: 165052 - DNA, 20 bp, Homo sapiens
  source 1..20: mol_type = genomic DNA
agggttttgctatgctggcc

SEQ ID NO: 165053 - DNA, 20 bp, Homo sapiens
  source 1..20: mol_type = genomic DNA
gggttttgctatgctggcca

SEQ ID NO: 165054 - DNA, 20 bp, Homo sapiens
  source 1..20: mol_type = genomic DNA
ggttttgctatgctggccag

SEQ ID NO: 165055 - DNA, 20 bp, Homo sapiens
  source 1..20: mol_type = genomic DNA
gttttgctatgctggccagg

SEQ ID NO: 165056 - DNA, 20 bp, Homo sapiens
  source 1..20: mol_type = genomic DNA
ttttgctatgctggccaggc

SEQ ID NO: 165057 - DNA, 20 bp, Homo sapiens
  source 1..20: mol_type = genomic DNA
tttgctatgctggccaggct

SEQ ID NO: 165058 - DNA, 20 bp, Homo sapiens
  source 1..20: mol_type = genomic DNA
ttgctatgctggccaggctg

SEQ ID NO: 165059 - DNA, 20 bp, Homo sapiens
  source 1..20: mol_type = genomic DNA
tgctatgctggccaggctgg

SEQ ID NO: 165060 - DNA, 20 bp, Homo sapiens
  source 1..20: mol_type = genomic DNA
gctatgctggccaggctggt

SEQ ID NO: 165061 - DNA, 20 bp, Homo sapiens
  source 1..20: mol_type = genomic DNA
ctatgctggccaggctggtc

SEQ ID NO: 165062 - DNA, 20 bp, Homo sapiens
  source 1..20: mol_type = genomic DNA
tatgctggccaggctggtct

SEQ ID NO: 165063 - DNA, 20 bp, Homo sapiens
  source 1..20: mol_type = genomic DNA
atgctggccaggctggtctc

SEQ ID NO: 165064 - DNA, 20 bp, Homo sapiens
  source 1..20: mol_type = genomic DNA
tgctggccaggctggtctca

SEQ ID NO: 165065 - DNA, 20 bp, Homo sapiens
  source 1..20: mol_type = genomic DNA
gctggccaggctggtctcaa

SEQ ID NO: 165066 - DNA, 20 bp, Homo sapiens
  source 1..20: mol_type = genomic DNA
ctggccaggctggtctcaaa

SEQ ID NO: 165067 - DNA, 20 bp, Homo sapiens
  source 1..20: mol_type = genomic DNA
tggccaggctggtctcaaac

SEQ ID NO: 165068 - DNA, 20 bp, Homo sapiens
  source 1..20: mol_type = genomic DNA
ggccaggctggtctcaaact

SEQ ID NO: 165069 - DNA, 20 bp, Homo sapiens
  source 1..20: mol_type = genomic DNA
gccaggctggtctcaaactc

SEQ ID NO: 165070 - DNA, 20 bp, Homo sapiens
  source 1..20: mol_type = genomic DNA
ccaggctggtctcaaactcc

SEQ ID NO: 165071 - DNA, 20 bp, Homo sapiens
  source 1..20: mol_type = genomic DNA
caggctggtctcaaactcct

SEQ ID NO: 165072 - DNA, 20 bp, Homo sapiens
  source 1..20: mol_type = genomic DNA
aggctggtctcaaactcctg

SEQ ID NO: 165073 - DNA, 20 bp, Homo sapiens
  source 1..20: mol_type = genomic DNA
ggctggtctcaaactcctga

SEQ ID NO: 165074 - DNA, 20 bp, Homo sapiens
  source 1..20: mol_type = genomic DNA
gctggtctcaaactcctgac

SEQ ID NO: 165075 - DNA, 20 bp, Homo sapiens
  source 1..20: mol_type = genomic DNA
ctggtctcaaactcctgacc

SEQ ID NO: 165076 - DNA, 20 bp, Homo sapiens
  source 1..20: mol_type = genomic DNA
tggtctcaaactcctgacct

SEQ ID NO: 165077 - DNA, 20 bp, Homo sapiens
  source 1..20: mol_type = genomic DNA
ggtctcaaactcctgacctc

SEQ ID NO: 165078 - DNA, 20 bp, Homo sapiens
  source 1..20: mol_type = genomic DNA
gtctcaaactcctgacctca

SEQ ID NO: 165079 - DNA, 20 bp, Homo sapiens
  source 1..20: mol_type = genomic DNA
tctcaaactcctgacctcag

SEQ ID NO: 165080 - DNA, 20 bp, Homo sapiens
  source 1..20: mol_type = genomic DNA
ctcaaactcctgacctcaga

SEQ ID NO: 165081 - DNA, 20 bp, Homo sapiens
  source 1..20: mol_type = genomic DNA
tcaaactcctgacctcagat

SEQ ID NO: 165082 - DNA, 20 bp, Homo sapiens
  source 1..20: mol_type = genomic DNA
caaactcctgacctcagatg

SEQ ID NO: 165083 - DNA, 20 bp, Homo sapiens
  source 1..20: mol_type = genomic DNA
aaactcctgacctcagatga

SEQ ID NO: 165084 - DNA, 20 bp, Homo sapiens
  source 1..20: mol_type = genomic DNA
aactcctgacctcagatgat

SEQ ID NO: 165085 - DNA, 20 bp, Homo sapiens
  source 1..20: mol_type = genomic DNA
actcctgacctcagatgatc

SEQ ID NO: 165086 - DNA, 20 bp, Homo sapiens
  source 1..20: mol_type = genomic DNA
ctcctgacctcagatgatcc

SEQ ID NO: 165087 - DNA, 20 bp, Homo sapiens
  source 1..20: mol_type = genomic DNA
tcctgacctcagatgatcca

SEQ ID NO: 165088 - DNA, 20 bp, Homo sapiens
  source 1..20: mol_type = genomic DNA
cctgacctcagatgatccag

SEQ ID NO: 165089 - DNA, 20 bp, Homo sapiens
  source 1..20: mol_type = genomic DNA
ctgacctcagatgatccagc

SEQ ID NO: 165090 - DNA, 20 bp, Homo sapiens
  source 1..20: mol_type = genomic DNA
tgacctcagatgatccagcc

SEQ ID NO: 165091 - DNA, 20 bp, Homo sapiens
  source 1..20: mol_type = genomic DNA
gacctcagatgatccagcca

SEQ ID NO: 165092 - DNA, 20 bp, Homo sapiens
  source 1..20: mol_type = genomic DNA
acctcagatgatccagccac

SEQ ID NO: 165093 - DNA, 20 bp, Homo sapiens
  source 1..20: mol_type = genomic DNA
cctcagatgatccagccacc

SEQ ID NO: 165094 - DNA, 20 bp, Homo sapiens
  source 1..20: mol_type = genomic DNA
ctcagatgatccagccacct

SEQ ID NO: 165095 - DNA, 20 bp, Homo sapiens
  source 1..20: mol_type = genomic DNA
tcagatgatccagccacctc

SEQ ID NO: 165096 - DNA, 20 bp, Homo sapiens
  source 1..20: mol_type = genomic DNA
cagatgatccagccacctca

SEQ ID NO: 165097 - DNA, 20 bp, Homo sapiens
  source 1..20: mol_type = genomic DNA
agatgatccagccacctcag

SEQ ID NO: 165098 - DNA, 20 bp, Homo sapiens
  source 1..20: mol_type = genomic DNA
gatgatccagccacctcagc

SEQ ID NO: 165099 - DNA, 20 bp, Homo sapiens
  source 1..20: mol_type = genomic DNA
atgatccagccacctcagct

SEQ ID NO: 165100 - DNA, 20 bp, Homo sapiens
  source 1..20: mol_type = genomic DNA
tgatccagccacctcagctt

SEQ ID NO: 165101 - DNA, 20 bp, Homo sapiens
  source 1..20: mol_type = genomic DNA
gatccagccacctcagcttc

SEQ ID NO: 165102 - DNA, 20 bp, Homo sapiens
  source 1..20: mol_type = genomic DNA
atccagccacctcagcttcc

SEQ ID NO: 165103 - DNA, 20 bp, Homo sapiens
  source 1..20: mol_type = genomic DNA
tccagccacctcagcttccc

SEQ ID NO: 165104 - DNA, 20 bp, Homo sapiens
  source 1..20: mol_type = genomic DNA
ccagccacctcagcttccca

SEQ ID NO: 165105 - DNA, 20 bp, Homo sapiens
  source 1..20: mol_type = genomic DNA
cagccacctcagcttcccaa

SEQ ID NO: 165106 - DNA, 20 bp, Homo sapiens
  source 1..20: mol_type = genomic DNA
agccacctcagcttcccaaa

SEQ ID NO: 165107 - DNA, 20 bp, Homo sapiens
  source 1..20: mol_type = genomic DNA
gccacctcagcttcccaaag

SEQ ID NO: 165108 - DNA, 20 bp, Homo sapiens
  source 1..20: mol_type = genomic DNA
ccacctcagcttcccaaagt

SEQ ID NO: 165109 - DNA, 20 bp, Homo sapiens
  source 1..20: mol_type = genomic DNA
cacctcagcttcccaaagtg

SEQ ID NO: 165110 - DNA, 20 bp, Homo sapiens
  source 1..20: mol_type = genomic DNA
acctcagcttcccaaagtgc

SEQ ID NO: 165111 - DNA, 20 bp, Homo sapiens
  source 1..20: mol_type = genomic DNA
cctcagcttcccaaagtgct

SEQ ID NO: 165112 - DNA, 20 bp, Homo sapiens
  source 1..20: mol_type = genomic DNA
ctcagcttcccaaagtgctg

SEQ ID NO: 165113 - DNA, 20 bp, Homo sapiens
  source 1..20: mol_type = genomic DNA
tcagcttcccaaagtgctgg

SEQ ID NO: 165114 - DNA, 20 bp, Homo sapiens
  source 1..20: mol_type = genomic DNA
cagcttcccaaagtgctggg

SEQ ID NO: 165115 - DNA, 20 bp, Homo sapiens
  source 1..20: mol_type = genomic DNA
agcttcccaaagtgctgggg

SEQ ID NO: 165116 - DNA, 20 bp, Homo sapiens
  source 1..20: mol_type = genomic DNA
gcttcccaaagtgctggggt

SEQ ID NO: 165117 - DNA, 20 bp, Homo sapiens
  source 1..20: mol_type = genomic DNA
cttcccaaagtgctggggtt

SEQ ID NO: 165118 - DNA, 20 bp, Homo sapiens
  source 1..20: mol_type = genomic DNA
ttcccaaagtgctggggttc

SEQ ID NO: 165119 - DNA, 20 bp, Homo sapiens
  source 1..20: mol_type = genomic DNA
tcccaaagtgctggggttcc

SEQ ID NO: 165120 - DNA, 20 bp, Homo sapiens
  source 1..20: mol_type = genomic DNA
cccaaagtgctggggttcca

SEQ ID NO: 165121 - DNA, 20 bp, Homo sapiens
  source 1..20: mol_type = genomic DNA
ccaaagtgctggggttccag

SEQ ID NO: 165122 - DNA, 20 bp, Homo sapiens
  source 1..20: mol_type = genomic DNA
caaagtgctggggttccagg

SEQ ID NO: 165123 - DNA, 20 bp, Homo sapiens
  source 1..20: mol_type = genomic DNA
aaagtgctggggttccaggt

SEQ ID NO: 165124 - DNA, 20 bp, Homo sapiens
  source 1..20: mol_type = genomic DNA
aagtgctggggttccaggtg

SEQ ID NO: 165125 - DNA, 20 bp, Homo sapiens
  source 1..20: mol_type = genomic DNA
agtgctggggttccaggtgt

SEQ ID NO: 165126 - DNA, 20 bp, Homo sapiens
  source 1..20: mol_type = genomic DNA
gtgctggggttccaggtgtt

SEQ ID NO: 165127 - DNA, 20 bp, Homo sapiens
  source 1..20: mol_type = genomic DNA
tgctggggttccaggtgtta

SEQ ID NO: 165128 - DNA, 20 bp, Homo sapiens
  source 1..20: mol_type = genomic DNA
gctggggttccaggtgttag

SEQ ID NO: 165129 - DNA, 20 bp, Homo sapiens
  source 1..20: mol_type = genomic DNA
ctggggttccaggtgttagc

SEQ ID NO: 165130 - DNA, 20 bp, Homo sapiens
  source 1..20: mol_type = genomic DNA
tggggttccaggtgttagcc

SEQ ID NO: 165131 - DNA, 20 bp, Homo sapiens
  source 1..20: mol_type = genomic DNA
ggggttccaggtgttagcca

SEQ ID NO: 165132 - DNA, 20 bp, Homo sapiens
  source 1..20: mol_type = genomic DNA
gggttccaggtgttagccac

SEQ ID NO: 165133 - DNA, 20 bp, Homo sapiens
  source 1..20: mol_type = genomic DNA
ggttccaggtgttagccacc

SEQ ID NO: 165134 - DNA, 20 bp, Homo sapiens
  source 1..20: mol_type = genomic DNA
gttccaggtgttagccacca

SEQ ID NO: 165135 - DNA, 20 bp, Homo sapiens
  source 1..20: mol_type = genomic DNA
ttccaggtgttagccaccat

SEQ ID NO: 165136 - DNA, 20 bp, Homo sapiens
  source 1..20: mol_type = genomic DNA
tccaggtgttagccaccatg

SEQ ID NO: 165137 - DNA, 20 bp, Homo sapiens
  source 1..20: mol_type = genomic DNA
ccaggtgttagccaccatgc

SEQ ID NO: 165138 - DNA, 20 bp, Homo sapiens
  source 1..20: mol_type = genomic DNA
caggtgttagccaccatgcc

SEQ ID NO: 165139 - DNA, 20 bp, Homo sapiens
  source 1..20: mol_type = genomic DNA
aggtgttagccaccatgcct

SEQ ID NO: 165140 - DNA, 20 bp, Homo sapiens
  source 1..20: mol_type = genomic DNA
ggtgttagccaccatgcctg

SEQ ID NO: 165141 - DNA, 20 bp, Homo sapiens
  source 1..20: mol_type = genomic DNA
gtgttagccaccatgcctgg

SEQ ID NO: 165142 - DNA, 20 bp, Homo sapiens
  source 1..20: mol_type = genomic DNA
tgttagccaccatgcctggc

SEQ ID NO: 165143 - DNA, 20 bp, Homo sapiens
  source 1..20: mol_type = genomic DNA
gttagccaccatgcctggcc

SEQ ID NO: 165144 - DNA, 20 bp, Homo sapiens
  source 1..20: mol_type = genomic DNA
ttagccaccatgcctggcca

SEQ ID NO: 165145 - DNA, 20 bp, Homo sapiens
  source 1..20: mol_type = genomic DNA
tagccaccatgcctggccat

SEQ ID NO: 165146 - DNA, 20 bp, Homo sapiens
  source 1..20: mol_type = genomic DNA
agccaccatgcctggccata

SEQ ID NO: 165147 - DNA, 20 bp, Homo sapiens
  source 1..20: mol_type = genomic DNA
gccaccatgcctggccatag

SEQ ID NO: 165148 - DNA, 20 bp, Homo sapiens
  source 1..20: mol_type = genomic DNA
ccaccatgcctggccataga

SEQ ID NO: 165149 - DNA, 20 bp, Homo sapiens
  source 1..20: mol_type = genomic DNA
caccatgcctggccatagac

SEQ ID NO: 165150 - DNA, 20 bp, Homo sapiens
  source 1..20: mol_type = genomic DNA
accatgcctggccatagact

SEQ ID NO: 165151 - DNA, 20 bp, Homo sapiens
  source 1..20: mol_type = genomic DNA
ccatgcctggccatagactt

SEQ ID NO: 165152 - DNA, 20 bp, Homo sapiens
  source 1..20: mol_type = genomic DNA
catgcctggccatagacttg

SEQ ID NO: 165153 - DNA, 20 bp, Homo sapiens
  source 1..20: mol_type = genomic DNA
atgcctggccatagacttgt

SEQ ID NO: 165154 - DNA, 20 bp, Homo sapiens
  source 1..20: mol_type = genomic DNA
tgcctggccatagacttgtt

SEQ ID NO: 165155 - DNA, 20 bp, Homo sapiens
  source 1..20: mol_type = genomic DNA
gcctggccatagacttgttt

SEQ ID NO: 165156 - DNA, 20 bp, Homo sapiens
  source 1..20: mol_type = genomic DNA
cctggccatagacttgtttc

SEQ ID NO: 165157 - DNA, 20 bp, Homo sapiens
  source 1..20: mol_type = genomic DNA
ctggccatagacttgtttct

SEQ ID NO: 165158 - DNA, 20 bp, Homo sapiens
  source 1..20: mol_type = genomic DNA
tggccatagacttgtttctg

SEQ ID NO: 165159 - DNA, 20 bp, Homo sapiens
  source 1..20: mol_type = genomic DNA
ggccatagacttgtttctgt

SEQ ID NO: 165160 - DNA, 20 bp, Homo sapiens
  source 1..20: mol_type = genomic DNA
gccatagacttgtttctgtt

SEQ ID NO: 165161 - DNA, 20 bp, Homo sapiens
  source 1..20: mol_type = genomic DNA
ccatagacttgtttctgttc

SEQ ID NO: 165162 - DNA, 20 bp, Homo sapiens
  source 1..20: mol_type = genomic DNA
catagacttgtttctgttcc

SEQ ID NO: 165163 - DNA, 20 bp, Homo sapiens
  source 1..20: mol_type = genomic DNA
atagacttgtttctgttccc

SEQ ID NO: 165164 - DNA, 20 bp, Homo sapiens
  source 1..20: mol_type = genomic DNA
tagacttgtttctgttccct

SEQ ID NO: 165165 - DNA, 20 bp, Homo sapiens
  source 1..20: mol_type = genomic DNA
agacttgtttctgttccctt

SEQ ID NO: 165166 - DNA, 20 bp, Homo sapiens
  source 1..20: mol_type = genomic DNA
gacttgtttctgttcccttc

SEQ ID NO: 165167 - DNA, 20 bp, Homo sapiens
  source 1..20: mol_type = genomic DNA
acttgtttctgttcccttct

SEQ ID NO: 165168 - DNA, 20 bp, Homo sapiens
  source 1..20: mol_type = genomic DNA
cttgtttctgttcccttctc

SEQ ID NO: 165169 - DNA, 20 bp, Homo sapiens
  source 1..20: mol_type = genomic DNA
ttgtttctgttcccttctca

SEQ ID NO: 165170 - DNA, 20 bp, Homo sapiens
  source 1..20: mol_type = genomic DNA
tgtttctgttcccttctcac

SEQ ID NO: 165171 - DNA, 20 bp, Homo sapiens
  source 1..20: mol_type = genomic DNA
gtttctgttcccttctcact

SEQ ID NO: 165172 - DNA, 20 bp, Homo sapiens
  source 1..20: mol_type = genomic DNA
tttctgttcccttctcactg

SEQ ID NO: 165173 - DNA, 20 bp, Homo sapiens
  source 1..20: mol_type = genomic DNA
ttctgttcccttctcactgt

SEQ ID NO: 165174 - DNA, 20 bp, Homo sapiens
  source 1..20: mol_type = genomic DNA
tctgttcccttctcactgtg

SEQ ID NO: 165175 - DNA, 20 bp, Homo sapiens
  source 1..20: mol_type = genomic DNA
ctgttcccttctcactgtgg

SEQ ID NO: 165176 - DNA, 20 bp, Homo sapiens
  source 1..20: mol_type = genomic DNA
tgttcccttctcactgtggc

SEQ ID NO: 165177 - DNA, 20 bp, Homo sapiens
  source 1..20: mol_type = genomic DNA
gttcccttctcactgtggct

SEQ ID NO: 165178 - DNA, 20 bp, Homo sapiens
  source 1..20: mol_type = genomic DNA
ttcccttctcactgtggctg

SEQ ID NO: 165179 - DNA, 20 bp, Homo sapiens
  source 1..20: mol_type = genomic DNA
tcccttctcactgtggctgt

SEQ ID NO: 165180 - DNA, 20 bp, Homo sapiens
  source 1..20: mol_type = genomic DNA
cccttctcactgtggctgta

SEQ ID NO: 165181 - DNA, 20 bp, Homo sapiens
  source 1..20: mol_type = genomic DNA
ccttctcactgtggctgtac

SEQ ID NO: 165182 - DNA, 20 bp, Homo sapiens
  source 1..20: mol_type = genomic DNA
cttctcactgtggctgtacc

SEQ ID NO: 165183 - DNA, 20 bp, Homo sapiens
  source 1..20: mol_type = genomic DNA
ttctcactgtggctgtacca

SEQ ID NO: 165184 - DNA, 20 bp, Homo sapiens
  source 1..20: mol_type = genomic DNA
tctcactgtggctgtaccaa

SEQ ID NO: 165185 - DNA, 20 bp, Homo sapiens
  source 1..20: mol_type = genomic DNA
ctcactgtggctgtaccaag

SEQ ID NO: 165186 - DNA, 20 bp, Homo sapiens
  source 1..20: mol_type = genomic DNA
tcactgtggctgtaccaagg

SEQ ID NO: 165187 - DNA, 20 bp, Homo sapiens
  source 1..20: mol_type = genomic DNA
cactgtggctgtaccaaggt

SEQ ID NO: 165188 - DNA, 20 bp, Homo sapiens
  source 1..20: mol_type = genomic DNA
actgtggctgtaccaaggtg

SEQ ID NO: 165189 - DNA, 20 bp, Homo sapiens
  source 1..20: mol_type = genomic DNA
ctgtggctgtaccaaggtgt

SEQ ID NO: 165190 - DNA, 20 bp, Homo sapiens
  source 1..20: mol_type = genomic DNA
tgtggctgtaccaaggtgtt

SEQ ID NO: 165191 - DNA, 20 bp, Homo sapiens
  source 1..20: mol_type = genomic DNA
gtggctgtaccaaggtgttg

SEQ ID NO: 165192 - DNA, 20 bp, Homo sapiens
  source 1..20: mol_type = genomic DNA
tggctgtaccaaggtgttgc

SEQ ID NO: 165193 - DNA, 20 bp, Homo sapiens
  source 1..20: mol_type = genomic DNA
ggctgtaccaaggtgttgct

SEQ ID NO: 165194 - DNA, 20 bp, Homo sapiens
  source 1..20: mol_type = genomic DNA
gctgtaccaaggtgttgctt

SEQ ID NO: 165195 - DNA, 20 bp, Homo sapiens
  source 1..20: mol_type = genomic DNA
ctgtaccaaggtgttgctta

SEQ ID NO: 165196 - DNA, 20 bp, Homo sapiens
  source 1..20: mol_type = genomic DNA
tgtaccaaggtgttgcttat

SEQ ID NO: 165197 - DNA, 20 bp, Homo sapiens
  source 1..20: mol_type = genomic DNA
gtaccaaggtgttgcttatc

SEQ ID NO: 165198 - DNA, 20 bp, Homo sapiens
  source 1..20: mol_type = genomic DNA
taccaaggtgttgcttatcc

SEQ ID NO: 165199 - DNA, 20 bp, Homo sapiens
  source 1..20: mol_type = genomic DNA
accaaggtgttgcttatccc

SEQ ID NO: 165200 - DNA, 20 bp, Homo sapiens
  source 1..20: mol_type = genomic DNA
ccaaggtgttgcttatccca

SEQ ID NO: 165201 - DNA, 20 bp, Homo sapiens
  source 1..20: mol_type = genomic DNA
caaggtgttgcttatcccag

SEQ ID NO: 165202 - DNA, 20 bp, Homo sapiens
  source 1..20: mol_type = genomic DNA
aaggtgttgcttatcccaga

SEQ ID NO: 165203 - DNA, 20 bp, Homo sapiens
  source 1..20: mol_type = genomic DNA
aggtgttgcttatcccagaa

SEQ ID NO: 165204 - DNA, 20 bp, Homo sapiens
  source 1..20: mol_type = genomic DNA
ggtgttgcttatcccagaag

SEQ ID NO: 165205 - DNA, 20 bp, Homo sapiens
  source 1..20: mol_type = genomic DNA
gtgttgcttatcccagaagt

SEQ ID NO: 165206 - DNA, 20 bp, Homo sapiens
  source 1..20: mol_type = genomic DNA
tgttgcttatcccagaagtc

SEQ ID NO: 165207 - DNA, 20 bp, Homo sapiens
  source 1..20: mol_type = genomic DNA
gttgcttatcccagaagtcg

SEQ ID NO: 165208 - DNA, 20 bp, Homo sapiens
  source 1..20: mol_type = genomic DNA
ttgcttatcccagaagtcgt

SEQ ID NO: 165209 - DNA, 20 bp, Homo sapiens
  source 1..20: mol_type = genomic DNA
tgcttatcccagaagtcgtg

SEQ ID NO: 165210 - DNA, 20 bp, Homo sapiens
  source 1..20: mol_type = genomic DNA
gcttatcccagaagtcgtga

SEQ ID NO: 165211 - DNA, 20 bp, Homo sapiens
  source 1..20: mol_type = genomic DNA
cttatcccagaagtcgtgat

SEQ ID NO: 165212 - DNA, 20 bp, Homo sapiens
  source 1..20: mol_type = genomic DNA
ttatcccagaagtcgtgatg

SEQ ID NO: 165213 - DNA, 20 bp, Homo sapiens
  source 1..20: mol_type = genomic DNA
tatcccagaagtcgtgatgc

SEQ ID NO: 165214 - DNA, 20 bp, Homo sapiens
  source 1..20: mol_type = genomic DNA
atcccagaagtcgtgatgca

SEQ ID NO: 165215 - DNA, 20 bp, Homo sapiens
  source 1..20: mol_type = genomic DNA
tcccagaagtcgtgatgcag

SEQ ID NO: 165216 - DNA, 20 bp, Homo sapiens
  source 1..20: mol_type = genomic DNA
cccagaagtcgtgatgcagg

SEQ ID NO: 165217 - DNA, 20 bp, Homo sapiens
  source 1..20: mol_type = genomic DNA
ccagaagtcgtgatgcaggt

SEQ ID NO: 165218 - DNA, 20 bp, Homo sapiens
  source 1..20: mol_type = genomic DNA
cagaagtcgtgatgcaggtc

SEQ ID NO: 165219 - DNA, 20 bp, Homo sapiens
  source 1..20: mol_type = genomic DNA
agaagtcgtgatgcaggtca

SEQ ID NO: 165220 - DNA, 20 bp, Homo sapiens
  source 1..20: mol_type = genomic DNA
gaagtcgtgatgcaggtcag

SEQ ID NO: 165221 - DNA, 20 bp, Homo sapiens
  source 1..20: mol_type = genomic DNA
aagtcgtgatgcaggtcagc

SEQ ID NO: 165222 - DNA, 20 bp, Homo sapiens
  source 1..20: mol_type = genomic DNA
agtcgtgatgcaggtcagca

SEQ ID NO: 165223 - DNA, 20 bp, Homo sapiens
  source 1..20: mol_type = genomic DNA
gtcgtgatgcaggtcagcac

SEQ ID NO: 165224 - DNA, 20 bp, Homo sapiens
  source 1..20: mol_type = genomic DNA
tcgtgatgcaggtcagcact

SEQ ID NO: 165225 - DNA, 20 bp, Homo sapiens
  source 1..20: mol_type = genomic DNA
cgtgatgcaggtcagcactt

SEQ ID NO: 165226 - DNA, 20 bp, Homo sapiens
  source 1..20: mol_type = genomic DNA
gtgatgcaggtcagcacttt

SEQ ID NO: 165227 - DNA, 20 bp, Homo sapiens
  source 1..20: mol_type = genomic DNA
tgatgcaggtcagcactttc

SEQ ID NO: 165228 - DNA, 20 bp, Homo sapiens
  source 1..20: mol_type = genomic DNA
gatgcaggtcagcactttct

SEQ ID NO: 165229 - DNA, 20 bp, Homo sapiens
  source 1..20: mol_type = genomic DNA
atgcaggtcagcactttctc

SEQ ID NO: 165230 - DNA, 20 bp, Homo sapiens
  source 1..20: mol_type = genomic DNA
tgcaggtcagcactttctcc

SEQ ID NO: 165231 - DNA, 20 bp, Homo sapiens
  source 1..20: mol_type = genomic DNA
gcaggtcagcactttctcca

SEQ ID NO: 165232 - DNA, 20 bp, Homo sapiens
  source 1..20: mol_type = genomic DNA
caggtcagcactttctccat

SEQ ID NO: 165233 - DNA, 20 bp, Homo sapiens
  source 1..20: mol_type = genomic DNA
aggtcagcactttctccatg

SEQ ID NO: 165234 - DNA, 20 bp, Homo sapiens
  source 1..20: mol_type = genomic DNA
ggtcagcactttctccatgg

SEQ ID NO: 165235 - DNA, 20 bp, Homo sapiens
  source 1..20: mol_type = genomic DNA
gtcagcactttctccatggg

SEQ ID NO: 165236 - DNA, 20 bp, Homo sapiens
  source 1..20: mol_type = genomic DNA
tcagcactttctccatggga

SEQ ID NO: 165237 - DNA, 20 bp, Homo sapiens
  source 1..20: mol_type = genomic DNA
cagcactttctccatgggaa

SEQ ID NO: 165238 - DNA, 20 bp, Homo sapiens
  source 1..20: mol_type = genomic DNA
agcactttctccatgggaag

SEQ ID NO: 165239 - DNA, 20 bp, Homo sapiens
  source 1..20: mol_type = genomic DNA
gcactttctccatgggaagt

SEQ ID NO: 165240 - DNA, 20 bp, Homo sapiens
  source 1..20: mol_type = genomic DNA
cactttctccatgggaagtt

SEQ ID NO: 165241 - DNA, 20 bp, Homo sapiens
  source 1..20: mol_type = genomic DNA
actttctccatgggaagttt

SEQ ID NO: 165242 - DNA, 20 bp, Homo sapiens
  source 1..20: mol_type = genomic DNA
ctttctccatgggaagtttt

SEQ ID NO: 165243 - DNA, 20 bp, Homo sapiens
  source 1..20: mol_type = genomic DNA
tttctccatgggaagtttta

SEQ ID NO: 165244 - DNA, 20 bp, Homo sapiens
  source 1..20: mol_type = genomic DNA
ttctccatgggaagttttag

SEQ ID NO: 165245 - DNA, 20 bp, Homo sapiens
  source 1..20: mol_type = genomic DNA
tctccatgggaagttttagc

SEQ ID NO: 165246 - DNA, 20 bp, Homo sapiens
  source 1..20: mol_type = genomic DNA
ctccatgggaagttttagca

SEQ ID NO: 165247 - DNA, 20 bp, Homo sapiens
  source 1..20: mol_type = genomic DNA
tccatgggaagttttagcag

SEQ ID NO: 165248 - DNA, 20 bp, Homo sapiens
  source 1..20: mol_type = genomic DNA
ccatgggaagttttagcagt

SEQ ID NO: 165249 - DNA, 20 bp, Homo sapiens
  source 1..20: mol_type = genomic DNA
catgggaagttttagcagtg

SEQ ID NO: 165250 - DNA, 20 bp, Homo sapiens
  source 1..20: mol_type = genomic DNA
atgggaagttttagcagtgt

SEQ ID NO: 165251 - DNA, 20 bp, Homo sapiens
  source 1..20: mol_type = genomic DNA
tgggaagttttagcagtgtt

SEQ ID NO: 165252 - DNA, 20 bp, Homo sapiens
  source 1..20: mol_type = genomic DNA
gggaagttttagcagtgttt

SEQ ID NO: 165253 - DNA, 20 bp, Homo sapiens
  source 1..20: mol_type = genomic DNA
ggaagttttagcagtgtttc

SEQ ID NO: 165254 - DNA, 20 bp, Homo sapiens
  source 1..20: mol_type = genomic DNA
gaagttttagcagtgtttct

SEQ ID NO: 165255 - DNA, 20 bp, Homo sapiens
  source 1..20: mol_type = genomic DNA
aagttttagcagtgtttctt

SEQ ID NO: 165256 - DNA, 20 bp, Homo sapiens
  source 1..20: mol_type = genomic DNA
agttttagcagtgtttcttt

SEQ ID NO: 165257 - DNA, 20 bp, Homo sapiens
  source 1..20: mol_type = genomic DNA
gttttagcagtgtttctttt

SEQ ID NO: 165258 - DNA, 20 bp, Homo sapiens
  source 1..20: mol_type = genomic DNA
ttttagcagtgtttcttttt

SEQ ID NO: 165259 - DNA, 20 bp, Homo sapiens
  source 1..20: mol_type = genomic DNA
tttagcagtgtttcttttta

SEQ ID NO: 165260 - DNA, 20 bp, Homo sapiens
  source 1..20: mol_type = genomic DNA
ttagcagtgtttctttttag

SEQ ID NO: 165261 - DNA, 20 bp, Homo sapiens
  source 1..20: mol_type = genomic DNA
tagcagtgtttctttttaga

SEQ ID NO: 165262 - DNA, 20 bp, Homo sapiens
  source 1..20: mol_type = genomic DNA
agcagtgtttctttttagaa

SEQ ID NO: 165263 - DNA, 20 bp, Homo sapiens
  source 1..20: mol_type = genomic DNA
gcagtgtttctttttagaat

SEQ ID NO: 165264 - DNA, 20 bp, Homo sapiens
  source 1..20: mol_type = genomic DNA
cagtgtttctttttagaatg

SEQ ID NO: 165265 - DNA, 20 bp, Homo sapiens
  source 1..20: mol_type = genomic DNA
agtgtttctttttagaatgt

SEQ ID NO: 165266 - DNA, 20 bp, Homo sapiens
  source 1..20: mol_type = genomic DNA
gtgtttctttttagaatgta

SEQ ID NO: 165267 - DNA, 20 bp, Homo sapiens
  source 1..20: mol_type = genomic DNA
tgtttctttttagaatgtat

SEQ ID NO: 165268 - DNA, 20 bp, Homo sapiens
  source 1..20: mol_type = genomic DNA
gtttctttttagaatgtatt

SEQ ID NO: 165269 - DNA, 20 bp, Homo sapiens
  source 1..20: mol_type = genomic DNA
tttctttttagaatgtattt

SEQ ID NO: 165270 - DNA, 20 bp, Homo sapiens
  source 1..20: mol_type = genomic DNA
ttctttttagaatgtatttg

SEQ ID NO: 165271 - DNA, 20 bp, Homo sapiens
  source 1..20: mol_type = genomic DNA
tctttttagaatgtatttgg

SEQ ID NO: 165272 - DNA, 20 bp, Homo sapiens
  source 1..20: mol_type = genomic DNA
ctttttagaatgtatttggg

SEQ ID NO: 165273 - DNA, 20 bp, Homo sapiens
  source 1..20: mol_type = genomic DNA
tttttagaatgtatttggga

SEQ ID NO: 165274 - DNA, 20 bp, Homo sapiens
  source 1..20: mol_type = genomic DNA
ttttagaatgtatttgggaa

SEQ ID NO: 165275 - DNA, 20 bp, Homo sapiens
  source 1..20: mol_type = genomic DNA
tttagaatgtatttgggaac

SEQ ID NO: 165276 - DNA, 20 bp, Homo sapiens
  source 1..20: mol_type = genomic DNA
ttagaatgtatttgggaact

SEQ ID NO: 165277 - DNA, 20 bp, Homo sapiens
  source 1..20: mol_type = genomic DNA
tagaatgtatttgggaactt

SEQ ID NO: 165278 - DNA, 20 bp, Homo sapiens
  source 1..20: mol_type = genomic DNA
agaatgtatttgggaacttt

SEQ ID NO: 165279 - DNA, 20 bp, Homo sapiens
  source 1..20: mol_type = genomic DNA
gaatgtatttgggaacttta

SEQ ID NO: 165280 - DNA, 20 bp, Homo sapiens
  source 1..20: mol_type = genomic DNA
aatgtatttgggaactttaa

SEQ ID NO: 165281 - DNA, 20 bp, Homo sapiens
  source 1..20: mol_type = genomic DNA
atgtatttgggaactttaat

SEQ ID NO: 165282 - DNA, 20 bp, Homo sapiens
  source 1..20: mol_type = genomic DNA
tgtatttgggaactttaatt

SEQ ID NO: 165283 - DNA, 20 bp, Homo sapiens
  source 1..20: mol_type = genomic DNA
gtatttgggaactttaattc

SEQ ID NO: 165284 - DNA, 20 bp, Homo sapiens
  source 1..20: mol_type = genomic DNA
tatttgggaactttaattca

SEQ ID NO: 165285 - DNA, 20 bp, Homo sapiens
  source 1..20: mol_type = genomic DNA
atttgggaactttaattcat

SEQ ID NO: 165286 - DNA, 20 bp, Homo sapiens
  source 1..20: mol_type = genomic DNA
tttgggaactttaattcata

SEQ ID NO: 165287 - DNA, 20 bp, Homo sapiens
  source 1..20: mol_type = genomic DNA
ttgggaactttaattcataa

SEQ ID NO: 165288 - DNA, 20 bp, Homo sapiens
  source 1..20: mol_type = genomic DNA
tgggaactttaattcataat

SEQ ID NO: 165289 - DNA, 20 bp, Homo sapiens
  source 1..20: mol_type = genomic DNA
gggaactttaattcataatt

SEQ ID NO: 165290 - DNA, 20 bp, Homo sapiens
  source 1..20: mol_type = genomic DNA
ggaactttaattcataattt

SEQ ID NO: 165291 - DNA, 20 bp, Homo sapiens
  source 1..20: mol_type = genomic DNA
gaactttaattcataattta

SEQ ID NO: 165292 - DNA, 20 bp, Homo sapiens
  source 1..20: mol_type = genomic DNA
aactttaattcataatttag

SEQ ID NO: 165293 - DNA, 20 bp, Homo sapiens
  source 1..20: mol_type = genomic DNA
actttaattcataatttagc

SEQ ID NO: 165294 - DNA, 20 bp, Homo sapiens
  source 1..20: mol_type = genomic DNA
ctttaattcataatttagct

SEQ ID NO: 165295 - DNA, 20 bp, Homo sapiens
  source 1..20: mol_type = genomic DNA
tttaattcataatttagctt

SEQ ID NO: 165296 - DNA, 20 bp, Homo sapiens
  source 1..20: mol_type = genomic DNA
ttaattcataatttagcttt

SEQ ID NO: 165297 - DNA, 20 bp, Homo sapiens
  source 1..20: mol_type = genomic DNA
taattcataatttagctttt

SEQ ID NO: 165298 - DNA, 20 bp, Homo sapiens
  source 1..20: mol_type = genomic DNA
aattcataatttagcttttt

SEQ ID NO: 165299 - DNA, 20 bp, Homo sapiens
  source 1..20: mol_type = genomic DNA
attcataatttagctttttt

SEQ ID NO: 165300 - DNA, 20 bp, Homo sapiens
  source 1..20: mol_type = genomic DNA
ttcataatttagcttttttt

SEQ ID NO: 165301 - DNA, 20 bp, Homo sapiens
  source 1..20: mol_type = genomic DNA
tcataatttagctttttttt

SEQ ID NO: 165302 - DNA, 20 bp, Homo sapiens
  source 1..20: mol_type = genomic DNA
cataatttagcttttttttc

SEQ ID NO: 165303 - DNA, 20 bp, Homo sapiens
  source 1..20: mol_type = genomic DNA
ataatttagcttttttttct

SEQ ID NO: 165304 - DNA, 20 bp, Homo sapiens
  source 1..20: mol_type = genomic DNA
taatttagcttttttttctt

SEQ ID NO: 165305 - DNA, 20 bp, Homo sapiens
  source 1..20: mol_type = genomic DNA
aatttagcttttttttcttc

SEQ ID NO: 165306 - DNA, 20 bp, Homo sapiens
  source 1..20: mol_type = genomic DNA
atttagcttttttttcttct

SEQ ID NO: 165307 - DNA, 20 bp, Homo sapiens
  source 1..20: mol_type = genomic DNA
tttagcttttttttcttctt

SEQ ID NO: 165308 - DNA, 20 bp, Homo sapiens
  source 1..20: mol_type = genomic DNA
ttagcttttttttcttcttc

SEQ ID NO: 165309 - DNA, 20 bp, Homo sapiens
  source 1..20: mol_type = genomic DNA
tagcttttttttcttcttct

SEQ ID NO: 165310 - DNA, 20 bp, Homo sapiens
  source 1..20: mol_type = genomic DNA
agcttttttttcttcttctt

SEQ ID NO: 165311 - DNA, 20 bp, Homo sapiens
  source 1..20: mol_type = genomic DNA
gcttttttttcttcttctta

SEQ ID NO: 165312 - DNA, 20 bp, Homo sapiens
  source 1..20: mol_type = genomic DNA
cttttttttcttcttcttat

SEQ ID NO: 165313 - DNA, 20 bp, Homo sapiens
  source 1..20: mol_type = genomic DNA
ttttttttcttcttcttata

SEQ ID NO: 165314 - DNA, 20 bp, Homo sapiens
  source 1..20: mol_type = genomic DNA
tttttttcttcttcttataa

SEQ ID NO: 165315 - DNA, 20 bp, Homo sapiens
  source 1..20: mol_type = genomic DNA
ttttttcttcttcttataaa

SEQ ID NO: 165316 - DNA, 20 bp, Homo sapiens
  source 1..20: mol_type = genomic DNA
tttttcttcttcttataaat

SEQ ID NO: 165317 - DNA, 20 bp, Homo sapiens
  source 1..20: mol_type = genomic DNA
ttttcttcttcttataaata

SEQ ID NO: 165318 - DNA, 20 bp, Homo sapiens
  source 1..20: mol_type = genomic DNA
tttcttcttcttataaatag

SEQ ID NO: 165319 - DNA, 20 bp, Homo sapiens
  source 1..20: mol_type = genomic DNA
ttcttcttcttataaatagg

SEQ ID NO: 165320 - DNA, 20 bp, Homo sapiens
  source 1..20: mol_type = genomic DNA
tcttcttcttataaataggc

SEQ ID NO: 165321 - DNA, 20 bp, Homo sapiens
  source 1..20: mol_type = genomic DNA
cttcttcttataaataggct

SEQ ID NO: 165322 - DNA, 20 bp, Homo sapiens
  source 1..20: mol_type = genomic DNA
ttcttcttataaataggctg

SEQ ID NO: 165323 - DNA, 20 bp, Homo sapiens
  source 1..20: mol_type = genomic DNA
tcttcttataaataggctgt

SEQ ID NO: 165324 - DNA, 20 bp, Homo sapiens
  source 1..20: mol_type = genomic DNA
cttcttataaataggctgta

SEQ ID NO: 165325 - DNA, 20 bp, Homo sapiens
  source 1..20: mol_type = genomic DNA
ttcttataaataggctgtac

SEQ ID NO: 165326 - DNA, 20 bp, Homo sapiens
  source 1..20: mol_type = genomic DNA
tcttataaataggctgtacc

SEQ ID NO: 165327 - DNA, 20 bp, Homo sapiens
  source 1..20: mol_type = genomic DNA
cttataaataggctgtacca

SEQ ID NO: 165328 - DNA, 20 bp, Homo sapiens
  source 1..20: mol_type = genomic DNA
ttataaataggctgtaccag

SEQ ID NO: 165329 - DNA, 20 bp, Homo sapiens
  source 1..20: mol_type = genomic DNA
tataaataggctgtaccagt

SEQ ID NO: 165330 - DNA, 20 bp, Homo sapiens
  source 1..20: mol_type = genomic DNA
ataaataggctgtaccagtg

SEQ ID NO: 165331 - DNA, 20 bp, Homo sapiens
  source 1..20: mol_type = genomic DNA
taaataggctgtaccagtgc

SEQ ID NO: 165332 - DNA, 20 bp, Homo sapiens
  source 1..20: mol_type = genomic DNA
aaataggctgtaccagtgca

SEQ ID NO: 165333 - DNA, 20 bp, Homo sapiens
  source 1..20: mol_type = genomic DNA
aataggctgtaccagtgcag

SEQ ID NO: 165334 - DNA, 20 bp, Homo sapiens
  source 1..20: mol_type = genomic DNA
ataggctgtaccagtgcagg

SEQ ID NO: 165335 - DNA, 20 bp, Homo sapiens
  source 1..20: mol_type = genomic DNA
taggctgtaccagtgcaggt

SEQ ID NO: 165336 - DNA, 20 bp, Homo sapiens
  source 1..20: mol_type = genomic DNA
aggctgtaccagtgcaggtc

SEQ ID NO: 165337 - DNA, 20 bp, Homo sapiens
  source 1..20: mol_type = genomic DNA
ggctgtaccagtgcaggtcc

SEQ ID NO: 165338 - DNA, 20 bp, Homo sapiens
  source 1..20: mol_type = genomic DNA
gctgtaccagtgcaggtcct

SEQ ID NO: 165339 - DNA, 20 bp, Homo sapiens
  source 1..20: mol_type = genomic DNA
ctgtaccagtgcaggtcctc

SEQ ID NO: 165340 - DNA, 20 bp, Homo sapiens
  source 1..20: mol_type = genomic DNA
tgtaccagtgcaggtcctca

SEQ ID NO: 165341 - DNA, 20 bp, Homo sapiens
  source 1..20: mol_type = genomic DNA
gtaccagtgcaggtcctcac

SEQ ID NO: 165342 - DNA, 20 bp, Homo sapiens
  source 1..20: mol_type = genomic DNA
taccagtgcaggtcctcact

SEQ ID NO: 165343 - DNA, 20 bp, Homo sapiens
  source 1..20: mol_type = genomic DNA
accagtgcaggtcctcactt

SEQ ID NO: 165344 - DNA, 20 bp, Homo sapiens
  source 1..20: mol_type = genomic DNA
ccagtgcaggtcctcacttt

SEQ ID NO: 165345 - DNA, 20 bp, Homo sapiens
  source 1..20: mol_type = genomic DNA
cagtgcaggtcctcacttta

SEQ ID NO: 165346 - DNA, 20 bp, Homo sapiens
  source 1..20: mol_type = genomic DNA
agtgcaggtcctcactttaa

SEQ ID NO: 165347 - DNA, 20 bp, Homo sapiens
  source 1..20: mol_type = genomic DNA
gtgcaggtcctcactttaat

SEQ ID NO: 165348 - DNA, 20 bp, Homo sapiens
  source 1..20: mol_type = genomic DNA
tgcaggtcctcactttaatc

SEQ ID NO: 165349 - DNA, 20 bp, Homo sapiens
  source 1..20: mol_type = genomic DNA
gcaggtcctcactttaatcc

SEQ ID NO: 165350 - DNA, 20 bp, Homo sapiens
  source 1..20: mol_type = genomic DNA
caggtcctcactttaatcct

SEQ ID NO: 165351 - DNA, 20 bp, Homo sapiens
  source 1..20: mol_type = genomic DNA
aggtcctcactttaatcctc

SEQ ID NO: 165352 - DNA, 20 bp, Homo sapiens
  source 1..20: mol_type = genomic DNA
ggtcctcactttaatcctct

SEQ ID NO: 165353 - DNA, 20 bp, Homo sapiens
  source 1..20: mol_type = genomic DNA
gtcctcactttaatcctcta

SEQ ID NO: 165354 - DNA, 20 bp, Homo sapiens
  source 1..20: mol_type = genomic DNA
tcctcactttaatcctctat

SEQ ID NO: 165355 - DNA, 20 bp, Homo sapiens
  source 1..20: mol_type = genomic DNA
cctcactttaatcctctatc

SEQ ID NO: 165356 - DNA, 20 bp, Homo sapiens
  source 1..20: mol_type = genomic DNA
ctcactttaatcctctatcc

SEQ ID NO: 165357 - DNA, 20 bp, Homo sapiens
  source 1..20: mol_type = genomic DNA
tcactttaatcctctatcca

SEQ ID NO: 165358 - DNA, 20 bp, Homo sapiens
  source 1..20: mol_type = genomic DNA
cactttaatcctctatccag

SEQ ID NO: 165359 - DNA, 20 bp, Homo sapiens
  source 1..20: mol_type = genomic DNA
actttaatcctctatccaga

SEQ ID NO: 165360 - DNA, 20 bp, Homo sapiens
  source 1..20: mol_type = genomic DNA
ctttaatcctctatccagaa

SEQ ID NO: 165361 - DNA, 20 bp, Homo sapiens
  source 1..20: mol_type = genomic DNA
tttaatcctctatccagaaa

SEQ ID NO: 165362 - DNA, 20 bp, Homo sapiens
  source 1..20: mol_type = genomic DNA
ttaatcctctatccagaaaa

SEQ ID NO: 165363 - DNA, 20 bp, Homo sapiens
  source 1..20: mol_type = genomic DNA
taatcctctatccagaaaac

SEQ ID NO: 165364 - DNA, 20 bp, Homo sapiens
  source 1..20: mol_type = genomic DNA
aatcctctatccagaaaaca

SEQ ID NO: 165365 - DNA, 20 bp, Homo sapiens
  source 1..20: mol_type = genomic DNA
atcctctatccagaaaacac

SEQ ID NO: 165366 - DNA, 20 bp, Homo sapiens
  source 1..20: mol_type = genomic DNA
tcctctatccagaaaacacg

SEQ ID NO: 165367 - DNA, 20 bp, Homo sapiens
  source 1..20: mol_type = genomic DNA
cctctatccagaaaacacgg

SEQ ID NO: 165368 - DNA, 20 bp, Homo sapiens
  source 1..20: mol_type = genomic DNA
ctctatccagaaaacacggt

SEQ ID NO: 165369 - DNA, 20 bp, Homo sapiens
  source 1..20: mol_type = genomic DNA
tctatccagaaaacacggtg

SEQ ID NO: 165370 - DNA, 20 bp, Homo sapiens
  source 1..20: mol_type = genomic DNA
ctatccagaaaacacggtgg

SEQ ID NO: 165371 - DNA, 20 bp, Homo sapiens
  source 1..20: mol_type = genomic DNA
tatccagaaaacacggtggg

SEQ ID NO: 165372 - DNA, 20 bp, Homo sapiens
  source 1..20: mol_type = genomic DNA
atccagaaaacacggtgggc

SEQ ID NO: 165373 - DNA, 20 bp, Homo sapiens
  source 1..20: mol_type = genomic DNA
tccagaaaacacggtgggcc

SEQ ID NO: 165374 - DNA, 20 bp, Homo sapiens
  source 1..20: mol_type = genomic DNA
ccagaaaacacggtgggcca

SEQ ID NO: 165375 - DNA, 20 bp, Homo sapiens
  source 1..20: mol_type = genomic DNA
cagaaaacacggtgggccaa

SEQ ID NO: 165376 - DNA, 20 bp, Homo sapiens
  source 1..20: mol_type = genomic DNA
agaaaacacggtgggccaaa

SEQ ID NO: 165377 - DNA, 20 bp, Homo sapiens
  source 1..20: mol_type = genomic DNA
gaaaacacggtgggccaaag

SEQ ID NO: 165378 - DNA, 20 bp, Homo sapiens
  source 1..20: mol_type = genomic DNA
aaaacacggtgggccaaagg

SEQ ID NO: 165379 - DNA, 20 bp, Homo sapiens
  source 1..20: mol_type = genomic DNA
aaacacggtgggccaaagga

SEQ ID NO: 165380 - DNA, 20 bp, Homo sapiens
  source 1..20: mol_type = genomic DNA
aacacggtgggccaaaggat

SEQ ID NO: 165381 - DNA, 20 bp, Homo sapiens
  source 1..20: mol_type = genomic DNA
acacggtgggccaaaggatg

SEQ ID NO: 165382 - DNA, 20 bp, Homo sapiens
  source 1..20: mol_type = genomic DNA
cacggtgggccaaaggatga

SEQ ID NO: 165383 - DNA, 20 bp, Homo sapiens
  source 1..20: mol_type = genomic DNA
acggtgggccaaaggatgaa

SEQ ID NO: 165384 - DNA, 20 bp, Homo sapiens
  source 1..20: mol_type = genomic DNA
cggtgggccaaaggatgaag

SEQ ID NO: 165385 - DNA, 20 bp, Homo sapiens
  source 1..20: mol_type = genomic DNA
ggtgggccaaaggatgaaga

SEQ ID NO: 165386 - DNA, 20 bp, Homo sapiens
  source 1..20: mol_type = genomic DNA
gtgggccaaaggatgaagag

SEQ ID NO: 165387 - DNA, 20 bp, Homo sapiens
  source 1..20: mol_type = genomic DNA
tgggccaaaggatgaagaga

SEQ ID NO: 165388 - DNA, 20 bp, Homo sapiens
  source 1..20: mol_type = genomic DNA
gggccaaaggatgaagagag

SEQ ID NO: 165389 - DNA, 20 bp, Homo sapiens
  source 1..20: mol_type = genomic DNA
ggccaaaggatgaagagagg

SEQ ID NO: 165390 - DNA, 20 bp, Homo sapiens
  source 1..20: mol_type = genomic DNA
gccaaaggatgaagagaggt

SEQ ID NO: 165391 - DNA, 20 bp, Homo sapiens
  source 1..20: mol_type = genomic DNA
ccaaaggatgaagagaggta

SEQ ID NO: 165392 - DNA, 20 bp, Homo sapiens
  source 1..20: mol_type = genomic DNA
caaaggatgaagagaggtaa

SEQ ID NO: 165393 - DNA, 20 bp, Homo sapiens
  source 1..20: mol_type = genomic DNA
aaaggatgaagagaggtaac

SEQ ID NO: 165394 - DNA, 20 bp, Homo sapiens
  source 1..20: mol_type = genomic DNA
aaggatgaagagaggtaaca

SEQ ID NO: 165395 - DNA, 20 bp, Homo sapiens
  source 1..20: mol_type = genomic DNA
aggatgaagagaggtaacaa

SEQ ID NO: 165396 - DNA, 20 bp, Homo sapiens
  source 1..20: mol_type = genomic DNA
ggatgaagagaggtaacaag

SEQ ID NO: 165397 - DNA, 20 bp, Homo sapiens
  source 1..20: mol_type = genomic DNA
gatgaagagaggtaacaaga

SEQ ID NO: 165398 - DNA, 20 bp, Homo sapiens
  source 1..20: mol_type = genomic DNA
atgaagagaggtaacaagat

SEQ ID NO: 165399 - DNA, 20 bp, Homo sapiens
  source 1..20: mol_type = genomic DNA
tgaagagaggtaacaagatg

SEQ ID NO: 165400 - DNA, 20 bp, Homo sapiens
  source 1..20: mol_type = genomic DNA
gaagagaggtaacaagatgc

SEQ ID NO: 165401 - DNA, 20 bp, Homo sapiens
  source 1..20: mol_type = genomic DNA
aagagaggtaacaagatgct

SEQ ID NO: 165402 - DNA, 20 bp, Homo sapiens
  source 1..20: mol_type = genomic DNA
agagaggtaacaagatgctt

SEQ ID NO: 165403 - DNA, 20 bp, Homo sapiens
  source 1..20: mol_type = genomic DNA
gagaggtaacaagatgctta

SEQ ID NO: 165404 - DNA, 20 bp, Homo sapiens
  source 1..20: mol_type = genomic DNA
agaggtaacaagatgcttaa

SEQ ID NO: 165405 - DNA, 20 bp, Homo sapiens
  source 1..20: mol_type = genomic DNA
gaggtaacaagatgcttaac

SEQ ID NO: 165406 - DNA, 20 bp, Homo sapiens
  source 1..20: mol_type = genomic DNA
aggtaacaagatgcttaact

SEQ ID NO: 165407 - DNA, 20 bp, Homo sapiens
  source 1..20: mol_type = genomic DNA
ggtaacaagatgcttaactc

SEQ ID NO: 165408 - DNA, 20 bp, Homo sapiens
  source 1..20: mol_type = genomic DNA
gtaacaagatgcttaactct

SEQ ID NO: 165409 - DNA, 20 bp, Homo sapiens
  source 1..20: mol_type = genomic DNA
taacaagatgcttaactctt

SEQ ID NO: 165410 - DNA, 20 bp, Homo sapiens
  source 1..20: mol_type = genomic DNA
aacaagatgcttaactcttg

SEQ ID NO: 165411 - DNA, 20 bp, Homo sapiens
  source 1..20: mol_type = genomic DNA
acaagatgcttaactcttgt

SEQ ID NO: 165412 - DNA, 20 bp, Homo sapiens
  source 1..20: mol_type = genomic DNA
caagatgcttaactcttgta

SEQ ID NO: 165413 - DNA, 20 bp, Homo sapiens
  source 1..20: mol_type = genomic DNA
aagatgcttaactcttgtaa

SEQ ID NO: 165414 - DNA, 20 bp, Homo sapiens
  source 1..20: mol_type = genomic DNA
agatgcttaactcttgtaat

SEQ ID NO: 165415 - DNA, 20 bp, Homo sapiens
  source 1..20: mol_type = genomic DNA
gatgcttaactcttgtaata

SEQ ID NO: 165416 - DNA, 20 bp, Homo sapiens
  source 1..20: mol_type = genomic DNA
atgcttaactcttgtaataa

SEQ ID NO: 165417 - DNA, 20 bp, Homo sapiens
  source 1..20: mol_type = genomic DNA
tgcttaactcttgtaataat

SEQ ID NO: 165418 - DNA, 20 bp, Homo sapiens
  source 1..20: mol_type = genomic DNA
gcttaactcttgtaataatg

SEQ ID NO: 165419 - DNA, 20 bp, Homo sapiens
  source 1..20: mol_type = genomic DNA
cttaactcttgtaataatgg

SEQ ID NO: 165420 - DNA, 20 bp, Homo sapiens
  source 1..20: mol_type = genomic DNA
ttaactcttgtaataatggc

SEQ ID NO: 165421 - DNA, 20 bp, Homo sapiens
  source 1..20: mol_type = genomic DNA
taactcttgtaataatggcg

SEQ ID NO: 165422 - DNA, 20 bp, Homo sapiens
  source 1..20: mol_type = genomic DNA
aactcttgtaataatggcga

SEQ ID NO: 165423 - DNA, 20 bp, Homo sapiens
  source 1..20: mol_type = genomic DNA
actcttgtaataatggcgat

SEQ ID NO: 165424 - DNA, 20 bp, Homo sapiens
  source 1..20: mol_type = genomic DNA
ctcttgtaataatggcgata

SEQ ID NO: 165425 - DNA, 20 bp, Homo sapiens
  source 1..20: mol_type = genomic DNA
tcttgtaataatggcgatag

SEQ ID NO: 165426 - DNA, 20 bp, Homo sapiens
  source 1..20: mol_type = genomic DNA
cttgtaataatggcgatagc

SEQ ID NO: 165427 - DNA, 20 bp, Homo sapiens
  source 1..20: mol_type = genomic DNA
ttgtaataatggcgatagct

SEQ ID NO: 165428 - DNA, 20 bp, Homo sapiens
  source 1..20: mol_type = genomic DNA
tgtaataatggcgatagctt

SEQ ID NO: 165429 - DNA, 20 bp, Homo sapiens
  source 1..20: mol_type = genomic DNA
gtaataatggcgatagcttt

SEQ ID NO: 165430 - DNA, 20 bp, Homo sapiens
  source 1..20: mol_type = genomic DNA
taataatggcgatagctttc

SEQ ID NO: 165431 - DNA, 20 bp, Homo sapiens
  source 1..20: mol_type = genomic DNA
aataatggcgatagctttct

SEQ ID NO: 165432 - DNA, 20 bp, Homo sapiens
  source 1..20: mol_type = genomic DNA
ataatggcgatagctttctg

SEQ ID NO: 165433 - DNA, 20 bp, Homo sapiens
  source 1..20: mol_type = genomic DNA
taatggcgatagctttctgg

SEQ ID NO: 165434 - DNA, 20 bp, Homo sapiens
  source 1..20: mol_type = genomic DNA
aatggcgatagctttctgga

SEQ ID NO: 165435 - DNA, 20 bp, Homo sapiens
  source 1..20: mol_type = genomic DNA
atggcgatagctttctggag

SEQ ID NO: 165436 - DNA, 20 bp, Homo sapiens
  source 1..20: mol_type = genomic DNA
tggcgatagctttctggagt

SEQ ID NO: 165437 - DNA, 20 bp, Homo sapiens
  source 1..20: mol_type = genomic DNA
ggcgatagctttctggagtt

SEQ ID NO: 165438 - DNA, 20 bp, Homo sapiens
  source 1..20: mol_type = genomic DNA
gcgatagctttctggagttc

SEQ ID NO: 165439 - DNA, 20 bp, Homo sapiens
  source 1..20: mol_type = genomic DNA
cgatagctttctggagttca

SEQ ID NO: 165440 - DNA, 20 bp, Homo sapiens
  source 1..20: mol_type = genomic DNA
gatagctttctggagttcat

SEQ ID NO: 165441 - DNA, 20 bp, Homo sapiens
  source 1..20: mol_type = genomic DNA
atagctttctggagttcata

SEQ ID NO: 165442 - DNA, 20 bp, Homo sapiens
  source 1..20: mol_type = genomic DNA
tagctttctggagttcatat

SEQ ID NO: 165443 - DNA, 20 bp, Homo sapiens
  source 1..20: mol_type = genomic DNA
agctttctggagttcatatg

SEQ ID NO: 165444 - DNA, 20 bp, Homo sapiens
  source 1..20: mol_type = genomic DNA
gctttctggagttcatatgg

SEQ ID NO: 165445 - DNA, 20 bp, Homo sapiens
  source 1..20: mol_type = genomic DNA
ctttctggagttcatatggt

SEQ ID NO: 165446 - DNA, 20 bp, Homo sapiens
  source 1..20: mol_type = genomic DNA
tttctggagttcatatggta

SEQ ID NO: 165447 - DNA, 20 bp, Homo sapiens
  source 1..20: mol_type = genomic DNA
ttctggagttcatatggtat

SEQ ID NO: 165448 - DNA, 20 bp, Homo sapiens
  source 1..20: mol_type = genomic DNA
tctggagttcatatggtata

SEQ ID NO: 165449 - DNA, 20 bp, Homo sapiens
  source 1..20: mol_type = genomic DNA
ctggagttcatatggtatac

SEQ ID NO: 165450 - DNA, 20 bp, Homo sapiens
  source 1..20: mol_type = genomic DNA
tggagttcatatggtatact

SEQ ID NO: 165451 - DNA, 20 bp, Homo sapiens
  source 1..20: mol_type = genomic DNA
ggagttcatatggtatacta

SEQ ID NO: 165452 - DNA, 20 bp, Homo sapiens
  source 1..20: mol_type = genomic DNA
gagttcatatggtatactac

SEQ ID NO: 165453 - DNA, 20 bp, Homo sapiens
  source 1..20: mol_type = genomic DNA
agttcatatggtatactact

SEQ ID NO: 165454 - DNA, 20 bp, Homo sapiens
  source 1..20: mol_type = genomic DNA
gttcatatggtatactactt

SEQ ID NO: 165455 - DNA, 20 bp, Homo sapiens
  source 1..20: mol_type = genomic DNA
ttcatatggtatactacttg

SEQ ID NO: 165456 - DNA, 20 bp, Homo sapiens
  source 1..20: mol_type = genomic DNA
tcatatggtatactacttgt

SEQ ID NO: 165457 - DNA, 20 bp, Homo sapiens
  source 1..20: mol_type = genomic DNA
catatggtatactacttgta

SEQ ID NO: 165458 - DNA, 20 bp, Homo sapiens
  source 1..20: mol_type = genomic DNA
atatggtatactacttgtaa

SEQ ID NO: 165459 - DNA, 20 bp, Homo sapiens
  source 1..20: mol_type = genomic DNA
tatggtatactacttgtaaa

SEQ ID NO: 165460 - DNA, 20 bp, Homo sapiens
  source 1..20: mol_type = genomic DNA
atggtatactacttgtaaat

SEQ ID NO: 165461 - DNA, 20 bp, Homo sapiens
  source 1..20: mol_type = genomic DNA
tggtatactacttgtaaata

SEQ ID NO: 165462 - DNA, 20 bp, Homo sapiens
  source 1..20: mol_type = genomic DNA
ggtatactacttgtaaatat

SEQ ID NO: 165463 - DNA, 20 bp, Homo sapiens
  source 1..20: mol_type = genomic DNA
gtatactacttgtaaatatg

SEQ ID NO: 165464 - DNA, 20 bp, Homo sapiens
  source 1..20: mol_type = genomic DNA
tatactacttgtaaatatgt

SEQ ID NO: 165465 - DNA, 20 bp, Homo sapiens
  source 1..20: mol_type = genomic DNA
atactacttgtaaatatgtg

SEQ ID NO: 165466 - DNA, 20 bp, Homo sapiens
  source 1..20: mol_type = genomic DNA
tactacttgtaaatatgtgc

SEQ ID NO: 165467 - DNA, 20 bp, Homo sapiens
  source 1..20: mol_type = genomic DNA
actacttgtaaatatgtgct

SEQ ID NO: 165468 - DNA, 20 bp, Homo sapiens
  source 1..20: mol_type = genomic DNA
ctacttgtaaatatgtgcta

SEQ ID NO: 165469 - DNA, 20 bp, Homo sapiens
  source 1..20: mol_type = genomic DNA
tacttgtaaatatgtgctaa

SEQ ID NO: 165470 - DNA, 20 bp, Homo sapiens
  source 1..20: mol_type = genomic DNA
acttgtaaatatgtgctaag

SEQ ID NO: 165471 - DNA, 20 bp, Homo sapiens
  source 1..20: mol_type = genomic DNA
cttgtaaatatgtgctaaga

SEQ ID NO: 165472 - DNA, 20 bp, Homo sapiens
  source 1..20: mol_type = genomic DNA
ttgtaaatatgtgctaagat

SEQ ID NO: 165473 - DNA, 20 bp, Homo sapiens
  source 1..20: mol_type = genomic DNA
tgtaaatatgtgctaagata

SEQ ID NO: 165474 - DNA, 20 bp, Homo sapiens
  source 1..20: mol_type = genomic DNA
gtaaatatgtgctaagataa

SEQ ID NO: 165475 - DNA, 20 bp, Homo sapiens
  source 1..20: mol_type = genomic DNA
taaatatgtgctaagataat

SEQ ID NO: 165476 - DNA, 20 bp, Homo sapiens
  source 1..20: mol_type = genomic DNA
aaatatgtgctaagataatt

SEQ ID NO: 165477 - DNA, 20 bp, Homo sapiens
  source 1..20: mol_type = genomic DNA
aatatgtgctaagataattc

SEQ ID NO: 165478 - DNA, 20 bp, Homo sapiens
  source 1..20: mol_type = genomic DNA
atatgtgctaagataattcc

SEQ ID NO: 165479 - DNA, 20 bp, Homo sapiens
  source 1..20: mol_type = genomic DNA
tatgtgctaagataattccg

SEQ ID NO: 165480 - DNA, 20 bp, Homo sapiens
  source 1..20: mol_type = genomic DNA
atgtgctaagataattccgt

SEQ ID NO: 165481 - DNA, 20 bp, Homo sapiens
  source 1..20: mol_type = genomic DNA
tgtgctaagataattccgtg

SEQ ID NO: 165482 - DNA, 20 bp, Homo sapiens
  source 1..20: mol_type = genomic DNA
gtgctaagataattccgtgt

SEQ ID NO: 165483 - DNA, 20 bp, Homo sapiens
  source 1..20: mol_type = genomic DNA
tgctaagataattccgtgtt

SEQ ID NO: 165484 - DNA, 20 bp, Homo sapiens
  source 1..20: mol_type = genomic DNA
gctaagataattccgtgttt

SEQ ID NO: 165485 - DNA, 20 bp, Homo sapiens
  source 1..20: mol_type = genomic DNA
ctaagataattccgtgtttc

SEQ ID NO: 165486 - DNA, 20 bp, Homo sapiens
  source 1..20: mol_type = genomic DNA
taagataattccgtgtttcc

SEQ ID NO: 165487 - DNA, 20 bp, Homo sapiens
  source 1..20: mol_type = genomic DNA
aagataattccgtgtttccc

SEQ ID NO: 165488 - DNA, 20 bp, Homo sapiens
  source 1..20: mol_type = genomic DNA
agataattccgtgtttcccc

SEQ ID NO: 165489 - DNA, 20 bp, Homo sapiens
  source 1..20: mol_type = genomic DNA
gataattccgtgtttccccc

SEQ ID NO: 165490 - DNA, 20 bp, Homo sapiens
  source 1..20: mol_type = genomic DNA
ataattccgtgtttccccca

SEQ ID NO: 165491 - DNA, 20 bp, Homo sapiens
  source 1..20: mol_type = genomic DNA
taattccgtgtttcccccac

SEQ ID NO: 165492 - DNA, 20 bp, Homo sapiens
  source 1..20: mol_type = genomic DNA
aattccgtgtttcccccacc

SEQ ID NO: 165493 - DNA, 20 bp, Homo sapiens
  source 1..20: mol_type = genomic DNA
attccgtgtttcccccacct

SEQ ID NO: 165494 - DNA, 20 bp, Homo sapiens
  source 1..20: mol_type = genomic DNA
ttccgtgtttcccccacctt

SEQ ID NO: 165495 - DNA, 20 bp, Homo sapiens
  source 1..20: mol_type = genomic DNA
tccgtgtttcccccaccttt

SEQ ID NO: 165496 - DNA, 20 bp, Homo sapiens
  source 1..20: mol_type = genomic DNA
ccgtgtttcccccacctttg

SEQ ID NO: 165497 - DNA, 20 bp, Homo sapiens
  source 1..20: mol_type = genomic DNA
cgtgtttcccccacctttgc

SEQ ID NO: 165498 - DNA, 20 bp, Homo sapiens
  source 1..20: mol_type = genomic DNA
gtgtttcccccacctttgct

SEQ ID NO: 165499 - DNA, 20 bp, Homo sapiens
  source 1..20: mol_type = genomic DNA
tgtttcccccacctttgctt

SEQ ID NO: 165500 - DNA, 20 bp, Homo sapiens
  source 1..20: mol_type = genomic DNA
gtttcccccacctttgcttt

SEQ ID NO: 165501 - DNA, 20 bp, Homo sapiens
  source 1..20: mol_type = genomic DNA
tttcccccacctttgctttt

SEQ ID NO: 165502 - DNA, 20 bp, Homo sapiens
  source 1..20: mol_type = genomic DNA
ttcccccacctttgcttttg

SEQ ID NO: 165503 - DNA, 20 bp, Homo sapiens
  source 1..20: mol_type = genomic DNA
tcccccacctttgcttttga

SEQ ID NO: 165504 - DNA, 20 bp, Homo sapiens
  source 1..20: mol_type = genomic DNA
cccccacctttgcttttgaa

SEQ ID NO: 165505 - DNA, 20 bp, Homo sapiens
  source 1..20: mol_type = genomic DNA
ccccacctttgcttttgaac

SEQ ID NO: 165506 - DNA, 20 bp, Homo sapiens
  source 1..20: mol_type = genomic DNA
cccacctttgcttttgaact

SEQ ID NO: 165507 - DNA, 20 bp, Homo sapiens
  source 1..20: mol_type = genomic DNA
ccacctttgcttttgaactt

SEQ ID NO: 165508 - DNA, 20 bp, Homo sapiens
  source 1..20: mol_type = genomic DNA
cacctttgcttttgaacttg

SEQ ID NO: 165509 - DNA, 20 bp, Homo sapiens
  source 1..20: mol_type = genomic DNA
acctttgcttttgaacttgc

SEQ ID NO: 165510 - DNA, 20 bp, Homo sapiens
  source 1..20: mol_type = genomic DNA
cctttgcttttgaacttgct

SEQ ID NO: 165511 - DNA, 20 bp, Homo sapiens
  source 1..20: mol_type = genomic DNA
ctttgcttttgaacttgctg

SEQ ID NO: 165512 - DNA, 20 bp, Homo sapiens
  source 1..20: mol_type = genomic DNA
tttgcttttgaacttgctga

SEQ ID NO: 165513 - DNA, 20 bp, Homo sapiens
  source 1..20: mol_type = genomic DNA
ttgcttttgaacttgctgac

SEQ ID NO: 165514 - DNA, 20 bp, Homo sapiens
  source 1..20: mol_type = genomic DNA
tgcttttgaacttgctgact

SEQ ID NO: 165515 - DNA, 20 bp, Homo sapiens
  source 1..20: mol_type = genomic DNA
gcttttgaacttgctgactc

SEQ ID NO: 165516 - DNA, 20 bp, Homo sapiens
  source 1..20: mol_type = genomic DNA
cttttgaacttgctgactca

SEQ ID NO: 165517 - DNA, 20 bp, Homo sapiens
  source 1..20: mol_type = genomic DNA
ttttgaacttgctgactcat

SEQ ID NO: 165518 - DNA, 20 bp, Homo sapiens
  source 1..20: mol_type = genomic DNA
tttgaacttgctgactcatc

SEQ ID NO: 165519 - DNA, 20 bp, Homo sapiens
  source 1..20: mol_type = genomic DNA
ttgaacttgctgactcatct

SEQ ID NO: 165520 - DNA, 20 bp, Homo sapiens
  source 1..20: mol_type = genomic DNA
tgaacttgctgactcatcta

SEQ ID NO: 165521 - DNA, 20 bp, Homo sapiens
  source 1..20: mol_type = genomic DNA
gaacttgctgactcatctaa

SEQ ID NO: 165522 - DNA, 20 bp, Homo sapiens
  source 1..20: mol_type = genomic DNA
aacttgctgactcatctaaa

SEQ ID NO: 165523 - DNA, 20 bp, Homo sapiens
  source 1..20: mol_type = genomic DNA
acttgctgactcatctaaac

SEQ ID NO: 165524 - DNA, 20 bp, Homo sapiens
  source 1..20: mol_type = genomic DNA
cttgctgactcatctaaacc

SEQ ID NO: 165525 - DNA, 20 bp, Homo sapiens
  source 1..20: mol_type = genomic DNA
ttgctgactcatctaaaccc

SEQ ID NO: 165526 - DNA, 20 bp, Homo sapiens
  source 1..20: mol_type = genomic DNA
tgctgactcatctaaacccc

SEQ ID NO: 165527 - DNA, 20 bp, Homo sapiens
  source 1..20: mol_type = genomic DNA
gctgactcatctaaacccct

SEQ ID NO: 165528 - DNA, 20 bp, Homo sapiens
  source 1..20: mol_type = genomic DNA
ctgactcatctaaacccctg

SEQ ID NO: 165529 - DNA, 20 bp, Homo sapiens
  source 1..20: mol_type = genomic DNA
tgactcatctaaacccctgc

SEQ ID NO: 165530 - DNA, 20 bp, Homo sapiens
  source 1..20: mol_type = genomic DNA
gactcatctaaacccctgct

SEQ ID NO: 165531 - DNA, 20 bp, Homo sapiens
  source 1..20: mol_type = genomic DNA
actcatctaaacccctgctc

SEQ ID NO: 165532 - DNA, 20 bp, Homo sapiens
  source 1..20: mol_type = genomic DNA
ctcatctaaacccctgctcc

SEQ ID NO: 165533 - DNA, 20 bp, Homo sapiens
  source 1..20: mol_type = genomic DNA
tcatctaaacccctgctccc

SEQ ID NO: 165534 - DNA, 20 bp, Homo sapiens
  source 1..20: mol_type = genomic DNA
catctaaacccctgctccca

SEQ ID NO: 165535 - DNA, 20 bp, Homo sapiens
  source 1..20: mol_type = genomic DNA
atctaaacccctgctcccaa

SEQ ID NO: 165536 - DNA, 20 bp, Homo sapiens
  source 1..20: mol_type = genomic DNA
tctaaacccctgctcccaaa

SEQ ID NO: 165537 - DNA, 20 bp, Homo sapiens
  source 1..20: mol_type = genomic DNA
ctaaacccctgctcccaaat

SEQ ID NO: 165538 - DNA, 20 bp, Homo sapiens
  source 1..20: mol_type = genomic DNA
taaacccctgctcccaaatg

SEQ ID NO: 165539 - DNA, 20 bp, Homo sapiens
  source 1..20: mol_type = genomic DNA
aaacccctgctcccaaatgc

SEQ ID NO: 165540 - DNA, 20 bp, Homo sapiens
  source 1..20: mol_type = genomic DNA
aacccctgctcccaaatgct

SEQ ID NO: 165541 - DNA, 20 bp, Homo sapiens
  source 1..20: mol_type = genomic DNA
acccctgctcccaaatgctg

SEQ ID NO: 165542 - DNA, 20 bp, Homo sapiens
  source 1..20: mol_type = genomic DNA
cccctgctcccaaatgctgg

SEQ ID NO: 165543 - DNA, 20 bp, Homo sapiens
  source 1..20: mol_type = genomic DNA
ccctgctcccaaatgctgga

SEQ ID NO: 165544 - DNA, 20 bp, Homo sapiens
  source 1..20: mol_type = genomic DNA
cctgctcccaaatgctggaa

SEQ ID NO: 165545 - DNA, 20 bp, Homo sapiens
  source 1..20: mol_type = genomic DNA
ctgctcccaaatgctggaat

SEQ ID NO: 165546 - DNA, 20 bp, Homo sapiens
  source 1..20: mol_type = genomic DNA
tgctcccaaatgctggaatg

SEQ ID NO: 165547 - DNA, 20 bp, Homo sapiens
  source 1..20: mol_type = genomic DNA
gctcccaaatgctggaatgc

SEQ ID NO: 165548 - DNA, 20 bp, Homo sapiens
  source 1..20: mol_type = genomic DNA
ctcccaaatgctggaatgct

SEQ ID NO: 165549 - DNA, 20 bp, Homo sapiens
  source 1..20: mol_type = genomic DNA
tcccaaatgctggaatgctt

SEQ ID NO: 165550 - DNA, 20 bp, Homo sapiens
  source 1..20: mol_type = genomic DNA
cccaaatgctggaatgcttt

SEQ ID NO: 165551 - DNA, 20 bp, Homo sapiens
  source 1..20: mol_type = genomic DNA
ccaaatgctggaatgctttt

SEQ ID NO: 165552 - DNA, 20 bp, Homo sapiens
  source 1..20: mol_type = genomic DNA
caaatgctggaatgctttta

SEQ ID NO: 165553 - DNA, 20 bp, Homo sapiens
  source 1..20: mol_type = genomic DNA
aaatgctggaatgcttttac

SEQ ID NO: 165554 - DNA, 20 bp, Homo sapiens
  source 1..20: mol_type = genomic DNA
aatgctggaatgcttttact

SEQ ID NO: 165555 - DNA, 20 bp, Homo sapiens
  source 1..20: mol_type = genomic DNA
atgctggaatgcttttactt

SEQ ID NO: 165556 - DNA, 20 bp, Homo sapiens
  source 1..20: mol_type = genomic DNA
tgctggaatgcttttacttc

SEQ ID NO: 165557 - DNA, 20 bp, Homo sapiens
  source 1..20: mol_type = genomic DNA
gctggaatgcttttacttcc

SEQ ID NO: 165558 - DNA, 20 bp, Homo sapiens
  source 1..20: mol_type = genomic DNA
ctggaatgcttttacttcct

SEQ ID NO: 165559 - DNA, 20 bp, Homo sapiens
  source 1..20: mol_type = genomic DNA
tggaatgcttttacttcctg

SEQ ID NO: 165560 - DNA, 20 bp, Homo sapiens
  source 1..20: mol_type = genomic DNA
ggaatgcttttacttcctgg

SEQ ID NO: 165561 - DNA, 20 bp, Homo sapiens
  source 1..20: mol_type = genomic DNA
gaatgcttttacttcctggg

SEQ ID NO: 165562 - DNA, 20 bp, Homo sapiens
  source 1..20: mol_type = genomic DNA
aatgcttttacttcctgggc

SEQ ID NO: 165563 - DNA, 20 bp, Homo sapiens
  source 1..20: mol_type = genomic DNA
atgcttttacttcctgggct

SEQ ID NO: 165564 - DNA, 20 bp, Homo sapiens
  source 1..20: mol_type = genomic DNA
tgcttttacttcctgggctt

SEQ ID NO: 165565 - DNA, 20 bp, Homo sapiens
  source 1..20: mol_type = genomic DNA
gcttttacttcctgggctta

SEQ ID NO: 165566 - DNA, 20 bp, Homo sapiens
  source 1..20: mol_type = genomic DNA
cttttacttcctgggcttaa

SEQ ID NO: 165567 - DNA, 20 bp, Homo sapiens
  source 1..20: mol_type = genomic DNA
ttttacttcctgggcttaaa

SEQ ID NO: 165568 - DNA, 20 bp, Homo sapiens
  source 1..20: mol_type = genomic DNA
tttacttcctgggcttaaag

SEQ ID NO: 165569 - DNA, 20 bp, Homo sapiens
  source 1..20: mol_type = genomic DNA
ttacttcctgggcttaaagg

SEQ ID NO: 165570 - DNA, 20 bp, Homo sapiens
  source 1..20: mol_type = genomic DNA
tacttcctgggcttaaagga

SEQ ID NO: 165571 - DNA, 20 bp, Homo sapiens
  source 1..20: mol_type = genomic DNA
acttcctgggcttaaaggaa

SEQ ID NO: 165572 - DNA, 20 bp, Homo sapiens
  source 1..20: mol_type = genomic DNA
cttcctgggcttaaaggaat

SEQ ID NO: 165573 - DNA, 20 bp, Homo sapiens
  source 1..20: mol_type = genomic DNA
ttcctgggcttaaaggaatt

SEQ ID NO: 165574 - DNA, 20 bp, Homo sapiens
  source 1..20: mol_type = genomic DNA
tcctgggcttaaaggaattg

SEQ ID NO: 165575 - DNA, 20 bp, Homo sapiens
  source 1..20: mol_type = genomic DNA
cctgggcttaaaggaattga

SEQ ID NO: 165576 - DNA, 20 bp, Homo sapiens
  source 1..20: mol_type = genomic DNA
ctgggcttaaaggaattgac

SEQ ID NO: 165577 - DNA, 20 bp, Homo sapiens
  source 1..20: mol_type = genomic DNA
tgggcttaaaggaattgaca

SEQ ID NO: 165578 - DNA, 20 bp, Homo sapiens
  source 1..20: mol_type = genomic DNA
gggcttaaaggaattgacaa

SEQ ID NO: 165579 - DNA, 20 bp, Homo sapiens
  source 1..20: mol_type = genomic DNA
ggcttaaaggaattgacaaa

SEQ ID NO: 165580 - DNA, 20 bp, Homo sapiens
  source 1..20: mol_type = genomic DNA
gcttaaaggaattgacaaat

SEQ ID NO: 165581 - DNA, 20 bp, Homo sapiens
  source 1..20: mol_type = genomic DNA
cttaaaggaattgacaaatg

SEQ ID NO: 165582 - DNA, 20 bp, Homo sapiens
  source 1..20: mol_type = genomic DNA
ttaaaggaattgacaaatgg

SEQ ID NO: 165583 - DNA, 20 bp, Homo sapiens
  source 1..20: mol_type = genomic DNA
taaaggaattgacaaatggg

SEQ ID NO: 165584 - DNA, 20 bp, Homo sapiens
  source 1..20: mol_type = genomic DNA
aaaggaattgacaaatgggg

SEQ ID NO: 165585 - DNA, 20 bp, Homo sapiens
  source 1..20: mol_type = genomic DNA
aaggaattgacaaatgggga

SEQ ID NO: 165586 - DNA, 20 bp, Homo sapiens
  source 1..20: mol_type = genomic DNA
aggaattgacaaatggggac

SEQ ID NO: 165587 - DNA, 20 bp, Homo sapiens
  source 1..20: mol_type = genomic DNA
ggaattgacaaatggggaca

SEQ ID NO: 165588 - DNA, 20 bp, Homo sapiens
  source 1..20: mol_type = genomic DNA
gaattgacaaatggggacac

SEQ ID NO: 165589 - DNA, 20 bp, Homo sapiens
  source 1..20: mol_type = genomic DNA
aattgacaaatggggacact

SEQ ID NO: 165590 - DNA, 20 bp, Homo sapiens
  source 1..20: mol_type = genomic DNA
attgacaaatggggacactt

SEQ ID NO: 165591 - DNA, 20 bp, Homo sapiens
  source 1..20: mol_type = genomic DNA
ttgacaaatggggacactta

SEQ ID NO: 165592 - DNA, 20 bp, Homo sapiens
  source 1..20: mol_type = genomic DNA
tgacaaatggggacacttaa

SEQ ID NO: 165593 - DNA, 20 bp, Homo sapiens
  source 1..20: mol_type = genomic DNA
gacaaatggggacacttaaa

SEQ ID NO: 165594 - DNA, 20 bp, Homo sapiens
  source 1..20: mol_type = genomic DNA
acaaatggggacacttaaaa

SEQ ID NO: 165595 - DNA, 20 bp, Homo sapiens
  source 1..20: mol_type = genomic DNA
caaatggggacacttaaaac

SEQ ID NO: 165596 - DNA, 20 bp, Homo sapiens
  source 1..20: mol_type = genomic DNA
aaatggggacacttaaaacg

SEQ ID NO: 165597 - DNA, 20 bp, Homo sapiens
  source 1..20: mol_type = genomic DNA
aatggggacacttaaaacga

SEQ ID NO: 165598 - DNA, 20 bp, Homo sapiens
  source 1..20: mol_type = genomic DNA
atggggacacttaaaacgat

SEQ ID NO: 165599 - DNA, 20 bp, Homo sapiens
  source 1..20: mol_type = genomic DNA
tggggacacttaaaacgatt

SEQ ID NO: 165600 - DNA, 20 bp, Homo sapiens
  source 1..20: mol_type = genomic DNA
ggggacacttaaaacgattt

SEQ ID NO: 165601 - DNA, 20 bp, Homo sapiens
  source 1..20: mol_type = genomic DNA
gggacacttaaaacgatttg

SEQ ID NO: 165602 - DNA, 20 bp, Homo sapiens
  source 1..20: mol_type = genomic DNA
ggacacttaaaacgatttgg

SEQ ID NO: 165603 - DNA, 20 bp, Homo sapiens
  source 1..20: mol_type = genomic DNA
gacacttaaaacgatttggt

SEQ ID NO: 165604 - DNA, 20 bp, Homo sapiens
  source 1..20: mol_type = genomic DNA
acacttaaaacgatttggtt

SEQ ID NO: 165605 - DNA, 20 bp, Homo sapiens
  source 1..20: mol_type = genomic DNA
cacttaaaacgatttggttt

SEQ ID NO: 165606 - DNA, 20 bp, Homo sapiens
  source 1..20: mol_type = genomic DNA
acttaaaacgatttggtttt

SEQ ID NO: 165607 - DNA, 20 bp, Homo sapiens
  source 1..20: mol_type = genomic DNA
cttaaaacgatttggttttg

SEQ ID NO: 165608 - DNA, 20 bp, Homo sapiens
  source 1..20: mol_type = genomic DNA
ttaaaacgatttggttttgt

SEQ ID NO: 165609 - DNA, 20 bp, Homo sapiens
  source 1..20: mol_type = genomic DNA
taaaacgatttggttttgta

SEQ ID NO: 165610 - DNA, 20 bp, Homo sapiens
  source 1..20: mol_type = genomic DNA
aaaacgatttggttttgtag

SEQ ID NO: 165611 - DNA, 20 bp, Homo sapiens
  source 1..20: mol_type = genomic DNA
aaacgatttggttttgtagc

SEQ ID NO: 165612 - DNA, 20 bp, Homo sapiens
  source 1..20: mol_type = genomic DNA
aacgatttggttttgtagca

SEQ ID NO: 165613 - DNA, 20 bp, Homo sapiens
  source 1..20: mol_type = genomic DNA
acgatttggttttgtagcat

SEQ ID NO: 165614 - DNA, 20 bp, Homo sapiens
  source 1..20: mol_type = genomic DNA
cgatttggttttgtagcatt

SEQ ID NO: 165615 - DNA, 20 bp, Homo sapiens
  source 1..20: mol_type = genomic DNA
gatttggttttgtagcattt

SEQ ID NO: 165616 - DNA, 20 bp, Homo sapiens
  source 1..20: mol_type = genomic DNA
atttggttttgtagcattta

SEQ ID NO: 165617 - DNA, 20 bp, Homo sapiens
  source 1..20: mol_type = genomic DNA
tttggttttgtagcatttat

SEQ ID NO: 165618 - DNA, 20 bp, Homo sapiens
  source 1..20: mol_type = genomic DNA
ttggttttgtagcatttatt

SEQ ID NO: 165619 - DNA, 20 bp, Homo sapiens
  source 1..20: mol_type = genomic DNA
tggttttgtagcatttattg

SEQ ID NO: 165620 - DNA, 20 bp, Homo sapiens
  source 1..20: mol_type = genomic DNA
ggttttgtagcatttattga

SEQ ID NO: 165621 - DNA, 20 bp, Homo sapiens
  source 1..20: mol_type = genomic DNA
gttttgtagcatttattgaa

SEQ ID NO: 165622 - DNA, 20 bp, Homo sapiens
  source 1..20: mol_type = genomic DNA
ttttgtagcatttattgaat

SEQ ID NO: 165623 - DNA, 20 bp, Homo sapiens
  source 1..20: mol_type = genomic DNA
tttgtagcatttattgaata

SEQ ID NO: 165624 - DNA, 20 bp, Homo sapiens
  source 1..20: mol_type = genomic DNA
ttgtagcatttattgaatat

SEQ ID NO: 165625 - DNA, 20 bp, Homo sapiens
  source 1..20: mol_type = genomic DNA
tgtagcatttattgaatata

SEQ ID NO: 165626 - DNA, 20 bp, Homo sapiens
  source 1..20: mol_type = genomic DNA
gtagcatttattgaatatag

SEQ ID NO: 165627 - DNA, 20 bp, Homo sapiens
  source 1..20: mol_type = genomic DNA
tagcatttattgaatataga

SEQ ID NO: 165628 - DNA, 20 bp, Homo sapiens
  source 1..20: mol_type = genomic DNA
agcatttattgaatatagaa

SEQ ID NO: 165629 - DNA, 20 bp, Homo sapiens
  source 1..20: mol_type = genomic DNA
gcatttattgaatatagaac

SEQ ID NO: 165630 - DNA, 20 bp, Homo sapiens
  source 1..20: mol_type = genomic DNA
catttattgaatatagaact

SEQ ID NO: 165631 - DNA, 20 bp, Homo sapiens
  source 1..20: mol_type = genomic DNA
atttattgaatatagaacta

SEQ ID NO: 165632 - DNA, 20 bp, Homo sapiens
  source 1..20: mol_type = genomic DNA
tttattgaatatagaactaa

SEQ ID NO: 165633 - DNA, 20 bp, Homo sapiens
  source 1..20: mol_type = genomic DNA
ttattgaatatagaactaat

SEQ ID NO: 165634 - DNA, 20 bp, Homo sapiens
  source 1..20: mol_type = genomic DNA
tattgaatatagaactaata

SEQ ID NO: 165635 - DNA, 20 bp, Homo sapiens
  source 1..20: mol_type = genomic DNA
attgaatatagaactaatac

SEQ ID NO: 165636 - DNA, 20 bp, Homo sapiens
  source 1..20: mol_type = genomic DNA
ttgaatatagaactaataca

SEQ ID NO: 165637 - DNA, 20 bp, Homo sapiens
  source 1..20: mol_type = genomic DNA
tgaatatagaactaatacaa

SEQ ID NO: 165638 - DNA, 20 bp, Homo sapiens
  source 1..20: mol_type = genomic DNA
gaatatagaactaatacaag

SEQ ID NO: 165639 - DNA, 20 bp, Homo sapiens
  source 1..20: mol_type = genomic DNA
aatatagaactaatacaagt

SEQ ID NO: 165640 - DNA, 20 bp, Homo sapiens
  source 1..20: mol_type = genomic DNA
atatagaactaatacaagtg

SEQ ID NO: 165641 - DNA, 20 bp, Homo sapiens
  source 1..20: mol_type = genomic DNA
tatagaactaatacaagtgc

SEQ ID NO: 165642 - DNA, 20 bp, Homo sapiens
  source 1..20: mol_type = genomic DNA
atagaactaatacaagtgcc

SEQ ID NO: 165643 - DNA, 20 bp, Homo sapiens
  source 1..20: mol_type = genomic DNA
tagaactaatacaagtgcca

SEQ ID NO: 165644 - DNA, 20 bp, Homo sapiens
  source 1..20: mol_type = genomic DNA
agaactaatacaagtgccaa

SEQ ID NO: 165645 - DNA, 20 bp, Homo sapiens
  source 1..20: mol_type = genomic DNA
gaactaatacaagtgccaaa

SEQ ID NO: 165646 - DNA, 20 bp, Homo sapiens
  source 1..20: mol_type = genomic DNA
aactaatacaagtgccaaag

SEQ ID NO: 165647 - DNA, 20 bp, Homo sapiens
  source 1..20: mol_type = genomic DNA
actaatacaagtgccaaagg

SEQ ID NO: 165648 - DNA, 20 bp, Homo sapiens
  source 1..20: mol_type = genomic DNA
ctaatacaagtgccaaaggg

SEQ ID NO: 165649 - DNA, 20 bp, Homo sapiens
  source 1..20: mol_type = genomic DNA
taatacaagtgccaaagggg

SEQ ID NO: 165650 - DNA, 20 bp, Homo sapiens
  source 1..20: mol_type = genomic DNA
aatacaagtgccaaagggga

SEQ ID NO: 165651 - DNA, 20 bp, Homo sapiens
  source 1..20: mol_type = genomic DNA
atacaagtgccaaaggggaa

SEQ ID NO: 165652 - DNA, 20 bp, Homo sapiens
  source 1..20: mol_type = genomic DNA
tacaagtgccaaaggggaac

SEQ ID NO: 165653 - DNA, 20 bp, Homo sapiens
  source 1..20: mol_type = genomic DNA
acaagtgccaaaggggaact

SEQ ID NO: 165654 - DNA, 20 bp, Homo sapiens
  source 1..20: mol_type = genomic DNA
caagtgccaaaggggaacta

SEQ ID NO: 165655 - DNA, 20 bp, Homo sapiens
  source 1..20: mol_type = genomic DNA
aagtgccaaaggggaactaa

SEQ ID NO: 165656 - DNA, 20 bp, Homo sapiens
  source 1..20: mol_type = genomic DNA
agtgccaaaggggaactaat

SEQ ID NO: 165657 - DNA, 20 bp, Homo sapiens
  source 1..20: mol_type = genomic DNA
gtgccaaaggggaactaata

SEQ ID NO: 165658 - DNA, 20 bp, Homo sapiens
  source 1..20: mol_type = genomic DNA
tgccaaaggggaactaatac

SEQ ID NO: 165659 - DNA, 20 bp, Homo sapiens
  source 1..20: mol_type = genomic DNA
gccaaaggggaactaataca

SEQ ID NO: 165660 - DNA, 20 bp, Homo sapiens
  source 1..20: mol_type = genomic DNA
ccaaaggggaactaatacag

SEQ ID NO: 165661 - DNA, 20 bp, Homo sapiens
  source 1..20: mol_type = genomic DNA
caaaggggaactaatacagg

SEQ ID NO: 165662 - DNA, 20 bp, Homo sapiens
  source 1..20: mol_type = genomic DNA
aaaggggaactaatacagga

SEQ ID NO: 165663 - DNA, 20 bp, Homo sapiens
  source 1..20: mol_type = genomic DNA
aaggggaactaatacaggaa

SEQ ID NO: 165664 - DNA, 20 bp, Homo sapiens
  source 1..20: mol_type = genomic DNA
aggggaactaatacaggaaa

SEQ ID NO: 165665 - DNA, 20 bp, Homo sapiens
  source 1..20: mol_type = genomic DNA
ggggaactaatacaggaaat

SEQ ID NO: 165666 - DNA, 20 bp, Homo sapiens
  source 1..20: mol_type = genomic DNA
gggaactaatacaggaaatg

SEQ ID NO: 165667 - DNA, 20 bp, Homo sapiens
  source 1..20: mol_type = genomic DNA
ggaactaatacaggaaatgt

SEQ ID NO: 165668 - DNA, 20 bp, Homo sapiens
  source 1..20: mol_type = genomic DNA
gaactaatacaggaaatgtc

SEQ ID NO: 165669 - DNA, 20 bp, Homo sapiens
  source 1..20: mol_type = genomic DNA
aactaatacaggaaatgtca

SEQ ID NO: 165670 - DNA, 20 bp, Homo sapiens
  source 1..20: mol_type = genomic DNA
actaatacaggaaatgtcat

SEQ ID NO: 165671 - DNA, 20 bp, Homo sapiens
  source 1..20: mol_type = genomic DNA
ctaatacaggaaatgtcatg

SEQ ID NO: 165672 - DNA, 20 bp, Homo sapiens
  source 1..20: mol_type = genomic DNA
taatacaggaaatgtcatga

SEQ ID NO: 165673 - DNA, 20 bp, Homo sapiens
  source 1..20: mol_type = genomic DNA
aatacaggaaatgtcatgaa

SEQ ID NO: 165674 - DNA, 20 bp, Homo sapiens
  source 1..20: mol_type = genomic DNA
atacaggaaatgtcatgaac

SEQ ID NO: 165675 - DNA, 20 bp, Homo sapiens
  source 1..20: mol_type = genomic DNA
tacaggaaatgtcatgaaca

SEQ ID NO: 165676 - DNA, 20 bp, Homo sapiens
  source 1..20: mol_type = genomic DNA
acaggaaatgtcatgaacag

SEQ ID NO: 165677 - DNA, 20 bp, Homo sapiens
  source 1..20: mol_type = genomic DNA
caggaaatgtcatgaacagt

SEQ ID NO: 165678 - DNA, 20 bp, Homo sapiens
  source 1..20: mol_type = genomic DNA
aggaaatgtcatgaacagta

SEQ ID NO: 165679 - DNA, 20 bp, Homo sapiens
  source 1..20: mol_type = genomic DNA
ggaaatgtcatgaacagtac

SEQ ID NO: 165680 - DNA, 20 bp, Homo sapiens
  source 1..20: mol_type = genomic DNA
gaaatgtcatgaacagtact

SEQ ID NO: 165681 - DNA, 20 bp, Homo sapiens
  source 1..20: mol_type = genomic DNA
aaatgtcatgaacagtactg

SEQ ID NO: 165682 - DNA, 20 bp, Homo sapiens
  source 1..20: mol_type = genomic DNA
aatgtcatgaacagtactgt

SEQ ID NO: 165683 - DNA, 20 bp, Homo sapiens
  source 1..20: mol_type = genomic DNA
atgtcatgaacagtactgtc

SEQ ID NO: 165684 - DNA, 20 bp, Homo sapiens
  source 1..20: mol_type = genomic DNA
tgtcatgaacagtactgtca

SEQ ID NO: 165685 - DNA, 20 bp, Homo sapiens
  source 1..20: mol_type = genomic DNA
gtcatgaacagtactgtcaa

SEQ ID NO: 165686 - DNA, 20 bp, Homo sapiens
  source 1..20: mol_type = genomic DNA
tcatgaacagtactgtcaac

SEQ ID NO: 165687 - DNA, 20 bp, Homo sapiens
  source 1..20: mol_type = genomic DNA
catgaacagtactgtcaacc

SEQ ID NO: 165688 - DNA, 20 bp, Homo sapiens
  source 1..20: mol_type = genomic DNA
atgaacagtactgtcaacca

SEQ ID NO: 165689 - DNA, 20 bp, Homo sapiens
  source 1..20: mol_type = genomic DNA
tgaacagtactgtcaaccac

SEQ ID NO: 165690 - DNA, 20 bp, Homo sapiens
  source 1..20: mol_type = genomic DNA
gaacagtactgtcaaccact

SEQ ID NO: 165691 - DNA, 20 bp, Homo sapiens
  source 1..20: mol_type = genomic DNA
aacagtactgtcaaccacta

SEQ ID NO: 165692 - DNA, 20 bp, Homo sapiens
  source 1..20: mol_type = genomic DNA
acagtactgtcaaccactag

SEQ ID NO: 165693 - DNA, 20 bp, Homo sapiens
  source 1..20: mol_type = genomic DNA
cagtactgtcaaccactagc

SEQ ID NO: 165694 - DNA, 20 bp, Homo sapiens
  source 1..20: mol_type = genomic DNA
agtactgtcaaccactagca

SEQ ID NO: 165695 - DNA, 20 bp, Homo sapiens
  source 1..20: mol_type = genomic DNA
gtactgtcaaccactagcaa

SEQ ID NO: 165696 - DNA, 20 bp, Homo sapiens
  source 1..20: mol_type = genomic DNA
tactgtcaaccactagcaaa

SEQ ID NO: 165697 - DNA, 20 bp, Homo sapiens
  source 1..20: mol_type = genomic DNA
actgtcaaccactagcaaaa

SEQ ID NO: 165698 - DNA, 20 bp, Homo sapiens
  source 1..20: mol_type = genomic DNA
ctgtcaaccactagcaaaat

SEQ ID NO: 165699 - DNA, 20 bp, Homo sapiens
  source 1..20: mol_type = genomic DNA
tgtcaaccactagcaaaatc

SEQ ID NO: 165700 - DNA, 20 bp, Homo sapiens
  source 1..20: mol_type = genomic DNA
gtcaaccactagcaaaatca

SEQ ID NO: 165701 - DNA, 20 bp, Homo sapiens
  source 1..20: mol_type = genomic DNA
tcaaccactagcaaaatcaa

SEQ ID NO: 165702 - DNA, 20 bp, Homo sapiens
  source 1..20: mol_type = genomic DNA
caaccactagcaaaatcaat

SEQ ID NO: 165703 - DNA, 20 bp, Homo sapiens
  source 1..20: mol_type = genomic DNA
aaccactagcaaaatcaatc

SEQ ID NO: 165704 - DNA, 20 bp, Homo sapiens
  source 1..20: mol_type = genomic DNA
accactagcaaaatcaatca

SEQ ID NO: 165705 - DNA, 20 bp, Homo sapiens
  source 1..20: mol_type = genomic DNA
ccactagcaaaatcaatcat

SEQ ID NO: 165706 - DNA, 20 bp, Homo sapiens
  source 1..20: mol_type = genomic DNA
cactagcaaaatcaatcatc

SEQ ID NO: 165707 - DNA, 20 bp, Homo sapiens
  source 1..20: mol_type = genomic DNA
actagcaaaatcaatcatca

SEQ ID NO: 165708 - DNA, 20 bp, Homo sapiens
  source 1..20: mol_type = genomic DNA
ctagcaaaatcaatcatcat

SEQ ID NO: 165709 - DNA, 20 bp, Homo sapiens
  source 1..20: mol_type = genomic DNA
tagcaaaatcaatcatcatt

SEQ ID NO: 165710 - DNA, 20 bp, Homo sapiens
  source 1..20: mol_type = genomic DNA
agcaaaatcaatcatcattg

SEQ ID NO: 165711 - DNA, 20 bp, Homo sapiens
  source 1..20: mol_type = genomic DNA
gcaaaatcaatcatcattgt

SEQ ID NO: 165712 - DNA, 20 bp, Homo sapiens
  source 1..20: mol_type = genomic DNA
caaaatcaatcatcattgtg

SEQ ID NO: 165713 - DNA, 20 bp, Homo sapiens
  source 1..20: mol_type = genomic DNA
aaaatcaatcatcattgtga

SEQ ID NO: 165714 - DNA, 20 bp, Homo sapiens
  source 1..20: mol_type = genomic DNA
aaatcaatcatcattgtgaa

SEQ ID NO: 165715 - DNA, 20 bp, Homo sapiens
  source 1..20: mol_type = genomic DNA
aatcaatcatcattgtgaaa

SEQ ID NO: 165716 - DNA, 20 bp, Homo sapiens
  source 1..20: mol_type = genomic DNA
atcaatcatcattgtgaaac

SEQ ID NO: 165717 - DNA, 20 bp, Homo sapiens
  source 1..20: mol_type = genomic DNA
tcaatcatcattgtgaaaca

SEQ ID NO: 165718 - DNA, 20 bp, Homo sapiens
  source 1..20: mol_type = genomic DNA
caatcatcattgtgaaacat

SEQ ID NO: 165719 - DNA, 20 bp, Homo sapiens
  source 1..20: mol_type = genomic DNA
aatcatcattgtgaaacata

SEQ ID NO: 165720 - DNA, 20 bp, Homo sapiens
  source 1..20: mol_type = genomic DNA
atcatcattgtgaaacatag

SEQ ID NO: 165721 - DNA, 20 bp, Homo sapiens
  source 1..20: mol_type = genomic DNA
tcatcattgtgaaacatagg

SEQ ID NO: 165722 - DNA, 20 bp, Homo sapiens
  source 1..20: mol_type = genomic DNA
catcattgtgaaacatagga

SEQ ID NO: 165723 - DNA, 20 bp, Homo sapiens
  source 1..20: mol_type = genomic DNA
atcattgtgaaacataggaa

SEQ ID NO: 165724 - DNA, 20 bp, Homo sapiens
  source 1..20: mol_type = genomic DNA
tcattgtgaaacataggaag

SEQ ID NO: 165725 - DNA, 20 bp, Homo sapiens
  source 1..20: mol_type = genomic DNA
cattgtgaaacataggaagc

SEQ ID NO: 165726 - DNA, 20 bp, Homo sapiens
  source 1..20: mol_type = genomic DNA
attgtgaaacataggaagct

SEQ ID NO: 165727 - DNA, 20 bp, Homo sapiens
  source 1..20: mol_type = genomic DNA
ttgtgaaacataggaagctt

SEQ ID NO: 165728 - DNA, 20 bp, Homo sapiens
  source 1..20: mol_type = genomic DNA
tgtgaaacataggaagcttc

SEQ ID NO: 165729 - DNA, 20 bp, Homo sapiens
  source 1..20: mol_type = genomic DNA
gtgaaacataggaagcttct

SEQ ID NO: 165730 - DNA, 20 bp, Homo sapiens
  source 1..20: mol_type = genomic DNA
tgaaacataggaagcttctg

SEQ ID NO: 165731 - DNA, 20 bp, Homo sapiens
  source 1..20: mol_type = genomic DNA
gaaacataggaagcttctgt

SEQ ID NO: 165732 - DNA, 20 bp, Homo sapiens
  source 1..20: mol_type = genomic DNA
aaacataggaagcttctgta

SEQ ID NO: 165733 - DNA, 20 bp, Homo sapiens
  source 1..20: mol_type = genomic DNA
aacataggaagcttctgtag

SEQ ID NO: 165734 - DNA, 20 bp, Homo sapiens
  source 1..20: mol_type = genomic DNA
acataggaagcttctgtaga

SEQ ID NO: 165735 - DNA, 20 bp, Homo sapiens
  source 1..20: mol_type = genomic DNA
cataggaagcttctgtagat

SEQ ID NO: 165736 - DNA, 20 bp, Homo sapiens
  source 1..20: mol_type = genomic DNA
ataggaagcttctgtagata

SEQ ID NO: 165737 - DNA, 20 bp, Homo sapiens
  source 1..20: mol_type = genomic DNA
taggaagcttctgtagataa

SEQ ID NO: 165738 - DNA, 20 bp, Homo sapiens
  source 1..20: mol_type = genomic DNA
aggaagcttctgtagataaa

SEQ ID NO: 165739 - DNA, 20 bp, Homo sapiens
  source 1..20: mol_type = genomic DNA
ggaagcttctgtagataaaa

SEQ ID NO: 165740 - DNA, 20 bp, Homo sapiens
  source 1..20: mol_type = genomic DNA
gaagcttctgtagataaaaa

SEQ ID NO: 165741 - DNA, 20 bp, Homo sapiens
  source 1..20: mol_type = genomic DNA
aagcttctgtagataaaaaa

SEQ ID NO: 165742 - DNA, 20 bp, Homo sapiens
  source 1..20: mol_type = genomic DNA
agcttctgtagataaaaaaa

SEQ ID NO: 165743 - DNA, 20 bp, Homo sapiens
  source 1..20: mol_type = genomic DNA
gcttctgtagataaaaaaaa

SEQ ID NO: 165744 - DNA, 20 bp, Homo sapiens
  source 1..20: mol_type = genomic DNA
cttctgtagataaaaaaaaa

SEQ ID NO: 165745 - DNA, 20 bp, Homo sapiens
  source 1..20: mol_type = genomic DNA
ttctgtagataaaaaaaaaa

SEQ ID NO: 165746 - DNA, 20 bp, Homo sapiens
  source 1..20: mol_type = genomic DNA
tctgtagataaaaaaaaaaa

SEQ ID NO: 165747 - DNA, 20 bp, Homo sapiens
  source 1..20: mol_type = genomic DNA
ctgtagataaaaaaaaaaat

SEQ ID NO: 165748 - DNA, 20 bp, Homo sapiens
  source 1..20: mol_type = genomic DNA
tgtagataaaaaaaaaaatt

SEQ ID NO: 165749 - DNA, 20 bp, Homo sapiens
  source 1..20: mol_type = genomic DNA
gtagataaaaaaaaaaattg

SEQ ID NO: 165750 - DNA, 20 bp, Homo sapiens
  source 1..20: mol_type = genomic DNA
tagataaaaaaaaaaattga

SEQ ID NO: 165751 - DNA, 20 bp, Homo sapiens
  source 1..20: mol_type = genomic DNA
agataaaaaaaaaaattgat

SEQ ID NO: 165752 - DNA, 20 bp, Homo sapiens
  source 1..20: mol_type = genomic DNA
gataaaaaaaaaaattgata

SEQ ID NO: 165753 - DNA, 20 bp, Homo sapiens
  source 1..20: mol_type = genomic DNA
ataaaaaaaaaaattgatac

SEQ ID NO: 165754 - DNA, 20 bp, Homo sapiens
  source 1..20: mol_type = genomic DNA
taaaaaaaaaaattgatact

SEQ ID NO: 165755 - DNA, 20 bp, Homo sapiens
  source 1..20: mol_type = genomic DNA
aaaaaaaaaaattgatactg

SEQ ID NO: 165756 - DNA, 20 bp, Homo sapiens
  source 1..20: mol_type = genomic DNA
aaaaaaaaaattgatactga

SEQ ID NO: 165757 - DNA, 20 bp, Homo sapiens
  source 1..20: mol_type = genomic DNA
aaaaaaaaattgatactgaa

SEQ ID NO: 165758 - DNA, 20 bp, Homo sapiens
  source 1..20: mol_type = genomic DNA
aaaaaaaattgatactgaaa

SEQ ID NO: 165759 - DNA, 20 bp, Homo sapiens
  source 1..20: mol_type = genomic DNA
aaaaaaattgatactgaaaa

SEQ ID NO: 165760 - DNA, 20 bp, Homo sapiens
  source 1..20: mol_type = genomic DNA
aaaaaattgatactgaaaac

SEQ ID NO: 165761 - DNA, 20 bp, Homo sapiens
  source 1..20: mol_type = genomic DNA
aaaaattgatactgaaaact

SEQ ID NO: 165762 - DNA, 20 bp, Homo sapiens
  source 1..20: mol_type = genomic DNA
aaaattgatactgaaaacta

SEQ ID NO: 165763 - DNA, 20 bp, Homo sapiens
  source 1..20: mol_type = genomic DNA
aaattgatactgaaaactag

SEQ ID NO: 165764 - DNA, 20 bp, Homo sapiens
  source 1..20: mol_type = genomic DNA
aattgatactgaaaactagt

SEQ ID NO: 165765 - DNA, 20 bp, Homo sapiens
  source 1..20: mol_type = genomic DNA
attgatactgaaaactagtc

SEQ ID NO: 165766 - DNA, 20 bp, Homo sapiens
  source 1..20: mol_type = genomic DNA
ttgatactgaaaactagtcg

SEQ ID NO: 165767 - DNA, 20 bp, Homo sapiens
  source 1..20: mol_type = genomic DNA
tgatactgaaaactagtcga

SEQ ID NO: 165768 - DNA, 20 bp, Homo sapiens
  source 1..20: mol_type = genomic DNA
gatactgaaaactagtcgag

SEQ ID NO: 165769 - DNA, 20 bp, Homo sapiens
  source 1..20: mol_type = genomic DNA
atactgaaaactagtcgaga

SEQ ID NO: 165770 - DNA, 20 bp, Homo sapiens
  source 1..20: mol_type = genomic DNA
tactgaaaactagtcgagac

SEQ ID NO: 165771 - DNA, 20 bp, Homo sapiens
  source 1..20: mol_type = genomic DNA
actgaaaactagtcgagact

SEQ ID NO: 165772 - DNA, 20 bp, Homo sapiens
  source 1..20: mol_type = genomic DNA
ctgaaaactagtcgagactc

SEQ ID NO: 165773 - DNA, 20 bp, Homo sapiens
  source 1..20: mol_type = genomic DNA
tgaaaactagtcgagactcc

SEQ ID NO: 165774 - DNA, 20 bp, Homo sapiens
  source 1..20: mol_type = genomic DNA
gaaaactagtcgagactcca

SEQ ID NO: 165775 - DNA, 20 bp, Homo sapiens
  source 1..20: mol_type = genomic DNA
aaaactagtcgagactccat

SEQ ID NO: 165776 - DNA, 20 bp, Homo sapiens
  source 1..20: mol_type = genomic DNA
aaactagtcgagactccatt

SEQ ID NO: 165777 - DNA, 20 bp, Homo sapiens
  source 1..20: mol_type = genomic DNA
aactagtcgagactccattt

SEQ ID NO: 165778 - DNA, 20 bp, Homo sapiens
  source 1..20: mol_type = genomic DNA
actagtcgagactccattta

SEQ ID NO: 165779 - DNA, 20 bp, Homo sapiens
  source 1..20: mol_type = genomic DNA
ctagtcgagactccatttat

SEQ ID NO: 165780 - DNA, 20 bp, Homo sapiens
  source 1..20: mol_type = genomic DNA
tagtcgagactccatttata

SEQ ID NO: 165781 - DNA, 20 bp, Homo sapiens
  source 1..20: mol_type = genomic DNA
agtcgagactccatttatat

SEQ ID NO: 165782 - DNA, 20 bp, Homo sapiens
  source 1..20: mol_type = genomic DNA
gtcgagactccatttatatg

SEQ ID NO: 165783 - DNA, 20 bp, Homo sapiens
  source 1..20: mol_type = genomic DNA
tcgagactccatttatatgt

SEQ ID NO: 165784 - DNA, 20 bp, Homo sapiens
  source 1..20: mol_type = genomic DNA
cgagactccatttatatgtg

SEQ ID NO: 165785 - DNA, 20 bp, Homo sapiens
  source 1..20: mol_type = genomic DNA
gagactccatttatatgtgt

SEQ ID NO: 165786 - DNA, 20 bp, Homo sapiens
  source 1..20: mol_type = genomic DNA
agactccatttatatgtgta

SEQ ID NO: 165787 - DNA, 20 bp, Homo sapiens
  source 1..20: mol_type = genomic DNA
gactccatttatatgtgtat

SEQ ID NO: 165788 - DNA, 20 bp, Homo sapiens
  source 1..20: mol_type = genomic DNA
actccatttatatgtgtatg

SEQ ID NO: 165789 - DNA, 20 bp, Homo sapiens
  source 1..20: mol_type = genomic DNA
ctccatttatatgtgtatgt

SEQ ID NO: 165790 - DNA, 20 bp, Homo sapiens
  source 1..20: mol_type = genomic DNA
tccatttatatgtgtatgtt

SEQ ID NO: 165791 - DNA, 20 bp, Homo sapiens
  source 1..20: mol_type = genomic DNA
ccatttatatgtgtatgttt

SEQ ID NO: 165792 - DNA, 20 bp, Homo sapiens
  source 1..20: mol_type = genomic DNA
catttatatgtgtatgtttt

SEQ ID NO: 165793 - DNA, 20 bp, Homo sapiens
  source 1..20: mol_type = genomic DNA
atttatatgtgtatgttttc

SEQ ID NO: 165794 - DNA, 20 bp, Homo sapiens
  source 1..20: mol_type = genomic DNA
tttatatgtgtatgttttct

SEQ ID NO: 165795 - DNA, 20 bp, Homo sapiens
  source 1..20: mol_type = genomic DNA
ttatatgtgtatgttttctg

SEQ ID NO: 165796 - DNA, 20 bp, Homo sapiens
  source 1..20: mol_type = genomic DNA
tatatgtgtatgttttctga

SEQ ID NO: 165797 - DNA, 20 bp, Homo sapiens
  source 1..20: mol_type = genomic DNA
atatgtgtatgttttctgaa

SEQ ID NO: 165798 - DNA, 20 bp, Homo sapiens
  source 1..20: mol_type = genomic DNA
tatgtgtatgttttctgaaa

SEQ ID NO: 165799 - DNA, 20 bp, Homo sapiens
  source 1..20: mol_type = genomic DNA
atgtgtatgttttctgaaag

SEQ ID NO: 165800 - DNA, 20 bp, Homo sapiens
  source 1..20: mol_type = genomic DNA
tgtgtatgttttctgaaagc

SEQ ID NO: 165801 - DNA, 20 bp, Homo sapiens
  source 1..20: mol_type = genomic DNA
gtgtatgttttctgaaagcc

SEQ ID NO: 165802 - DNA, 20 bp, Homo sapiens
  source 1..20: mol_type = genomic DNA
tgtatgttttctgaaagcct

SEQ ID NO: 165803 - DNA, 20 bp, Homo sapiens
  source 1..20: mol_type = genomic DNA
gtatgttttctgaaagcctt

SEQ ID NO: 165804 - DNA, 20 bp, Homo sapiens
  source 1..20: mol_type = genomic DNA
tatgttttctgaaagccttt

SEQ ID NO: 165805 - DNA, 20 bp, Homo sapiens
  source 1..20: mol_type = genomic DNA
atgttttctgaaagcctttc

SEQ ID NO: 165806 - DNA, 20 bp, Homo sapiens
  source 1..20: mol_type = genomic DNA
tgttttctgaaagcctttca

SEQ ID NO: 165807 - DNA, 20 bp, Homo sapiens
  source 1..20: mol_type = genomic DNA
gttttctgaaagcctttcag

SEQ ID NO: 165808 - DNA, 20 bp, Homo sapiens
  source 1..20: mol_type = genomic DNA
ttttctgaaagcctttcaga

SEQ ID NO: 165809 - DNA, 20 bp, Homo sapiens
  source 1..20: mol_type = genomic DNA
tttctgaaagcctttcagaa

SEQ ID NO: 165810 - DNA, 20 bp, Homo sapiens
  source 1..20: mol_type = genomic DNA
ttctgaaagcctttcagaaa

SEQ ID NO: 165811 - DNA, 20 bp, Homo sapiens
  source 1..20: mol_type = genomic DNA
tctgaaagcctttcagaaaa

SEQ ID NO: 165812 - DNA, 20 bp, Homo sapiens
  source 1..20: mol_type = genomic DNA
ctgaaagcctttcagaaaaa

SEQ ID NO: 165813 - DNA, 20 bp, Homo sapiens
  source 1..20: mol_type = genomic DNA
tgaaagcctttcagaaaaat

SEQ ID NO: 165814 - DNA, 20 bp, Homo sapiens
  source 1..20: mol_type = genomic DNA
gaaagcctttcagaaaaata

SEQ ID NO: 165815 - DNA, 20 bp, Homo sapiens
  source 1..20: mol_type = genomic DNA
aaagcctttcagaaaaatat

SEQ ID NO: 165816 - DNA, 20 bp, Homo sapiens
  source 1..20: mol_type = genomic DNA
aagcctttcagaaaaatatt

SEQ ID NO: 165817 - DNA, 20 bp, Homo sapiens
  source 1..20: mol_type = genomic DNA
agcctttcagaaaaatatta

SEQ ID NO: 165818 - DNA, 20 bp, Homo sapiens
  source 1..20: mol_type = genomic DNA
gcctttcagaaaaatattaa

SEQ ID NO: 165819 - DNA, 20 bp, Homo sapiens
  source 1..20: mol_type = genomic DNA
cctttcagaaaaatattaaa

SEQ ID NO: 165820 - DNA, 20 bp, Homo sapiens
  source 1..20: mol_type = genomic DNA
ctttcagaaaaatattaaat

SEQ ID NO: 165821 - DNA, 20 bp, Homo sapiens
  source 1..20: mol_type = genomic DNA
tttcagaaaaatattaaatt

SEQ ID NO: 165822 - DNA, 20 bp, Homo sapiens
  source 1..20: mol_type = genomic DNA
ttcagaaaaatattaaattt

SEQ ID NO: 165823 - DNA, 20 bp, Homo sapiens
  source 1..20: mol_type = genomic DNA
tcagaaaaatattaaattta

SEQ ID NO: 165824 - DNA, 20 bp, Homo sapiens
  source 1..20: mol_type = genomic DNA
cagaaaaatattaaatttaa

SEQ ID NO: 165825 - DNA, 20 bp, Homo sapiens
  source 1..20: mol_type = genomic DNA
agaaaaatattaaatttaag

SEQ ID NO: 165826 - DNA, 20 bp, Homo sapiens
  source 1..20: mol_type = genomic DNA
gaaaaatattaaatttaagg

SEQ ID NO: 165827 - DNA, 20 bp, Homo sapiens
  source 1..20: mol_type = genomic DNA
aaaaatattaaatttaagga

SEQ ID NO: 165828 - DNA, 20 bp, Homo sapiens
  source 1..20: mol_type = genomic DNA
aaaatattaaatttaaggac

SEQ ID NO: 165829 - DNA, 20 bp, Homo sapiens
  source 1..20: mol_type = genomic DNA
aaatattaaatttaaggaca

SEQ ID NO: 165830 - DNA, 20 bp, Homo sapiens
  source 1..20: mol_type = genomic DNA
aatattaaatttaaggacaa

SEQ ID NO: 165831 - DNA, 20 bp, Homo sapiens
  source 1..20: mol_type = genomic DNA
atattaaatttaaggacaag

SEQ ID NO: 165832 - DNA, 20 bp, Homo sapiens
  source 1..20: mol_type = genomic DNA
tattaaatttaaggacaaga

SEQ ID NO: 165833 - DNA, 20 bp, Homo sapiens
  source 1..20: mol_type = genomic DNA
attaaatttaaggacaagat

SEQ ID NO: 165834 - DNA, 20 bp, Homo sapiens
  source 1..20: mol_type = genomic DNA
ttaaatttaaggacaagatt

SEQ ID NO: 165835 - DNA, 20 bp, Homo sapiens
  source 1..20: mol_type = genomic DNA
taaatttaaggacaagattt

SEQ ID NO: 165836 - DNA, 20 bp, Homo sapiens
  source 1..20: mol_type = genomic DNA
aaatttaaggacaagatttt

SEQ ID NO: 165837 - DNA, 20 bp, Homo sapiens
  source 1..20: mol_type = genomic DNA
aatttaaggacaagattttt

SEQ ID NO: 165838 - DNA, 20 bp, Homo sapiens
  source 1..20: mol_type = genomic DNA
atttaaggacaagattttta

SEQ ID NO: 165839 - DNA, 20 bp, Homo sapiens
  source 1..20: mol_type = genomic DNA
tttaaggacaagatttttat

SEQ ID NO: 165840 - DNA, 20 bp, Homo sapiens
  source 1..20: mol_type = genomic DNA
ttaaggacaagatttttata

SEQ ID NO: 165841 - DNA, 20 bp, Homo sapiens
  source 1..20: mol_type = genomic DNA
taaggacaagatttttatat

SEQ ID NO: 165842 - DNA, 20 bp, Homo sapiens
  source 1..20: mol_type = genomic DNA
aaggacaagatttttatatc

SEQ ID NO: 165843 - DNA, 20 bp, Homo sapiens
  source 1..20: mol_type = genomic DNA
aggacaagatttttatatca

SEQ ID NO: 165844 - DNA, 20 bp, Homo sapiens
  source 1..20: mol_type = genomic DNA
ggacaagatttttatatcag

SEQ ID NO: 165845 - DNA, 20 bp, Homo sapiens
  source 1..20: mol_type = genomic DNA
gacaagatttttatatcaga

SEQ ID NO: 165846 - DNA, 20 bp, Homo sapiens
  source 1..20: mol_type = genomic DNA
acaagatttttatatcagag

SEQ ID NO: 165847 - DNA, 20 bp, Homo sapiens
  source 1..20: mol_type = genomic DNA
caagatttttatatcagagg

SEQ ID NO: 165848 - DNA, 20 bp, Homo sapiens
  source 1..20: mol_type = genomic DNA
aagatttttatatcagaggc

SEQ ID NO: 165849 - DNA, 20 bp, Homo sapiens
  source 1..20: mol_type = genomic DNA
agatttttatatcagaggcc

SEQ ID NO: 165850 - DNA, 20 bp, Homo sapiens
  source 1..20: mol_type = genomic DNA
gatttttatatcagaggcct

SEQ ID NO: 165851 - DNA, 20 bp, Homo sapiens
  source 1..20: mol_type = genomic DNA
atttttatatcagaggcctt

SEQ ID NO: 165852 - DNA, 20 bp, Homo sapiens
  source 1..20: mol_type = genomic DNA
tttttatatcagaggccttg

SEQ ID NO: 165853 - DNA, 20 bp, Homo sapiens
  source 1..20: mol_type = genomic DNA
ttttatatcagaggccttgg

SEQ ID NO: 165854 - DNA, 20 bp, Homo sapiens
  source 1..20: mol_type = genomic DNA
tttatatcagaggccttggg

SEQ ID NO: 165855 - DNA, 20 bp, Homo sapiens
  source 1..20: mol_type = genomic DNA
ttatatcagaggccttggga

SEQ ID NO: 165856 - DNA, 20 bp, Homo sapiens
  source 1..20: mol_type = genomic DNA
tatatcagaggccttgggac

SEQ ID NO: 165857 - DNA, 20 bp, Homo sapiens
  source 1..20: mol_type = genomic DNA
atatcagaggccttgggaca

SEQ ID NO: 165858 - DNA, 20 bp, Homo sapiens
  source 1..20: mol_type = genomic DNA
tatcagaggccttgggacat

SEQ ID NO: 165859 - DNA, 20 bp, Homo sapiens
  source 1..20: mol_type = genomic DNA
atcagaggccttgggacata

SEQ ID NO: 165860 - DNA, 20 bp, Homo sapiens
  source 1..20: mol_type = genomic DNA
tcagaggccttgggacatag

SEQ ID NO: 165861 - DNA, 20 bp, Homo sapiens
  source 1..20: mol_type = genomic DNA
cagaggccttgggacatagc

SEQ ID NO: 165862 - DNA, 20 bp, Homo sapiens
  source 1..20: mol_type = genomic DNA
agaggccttgggacatagct

SEQ ID NO: 165863 - DNA, 20 bp, Homo sapiens
  source 1..20: mol_type = genomic DNA
gaggccttgggacatagctt

SEQ ID NO: 165864 - DNA, 20 bp, Homo sapiens
  source 1..20: mol_type = genomic DNA
aggccttgggacatagcttt

SEQ ID NO: 165865 - DNA, 20 bp, Homo sapiens
  source 1..20: mol_type = genomic DNA
ggccttgggacatagctttg

SEQ ID NO: 165866 - DNA, 20 bp, Homo sapiens
  source 1..20: mol_type = genomic DNA
gccttgggacatagctttgt

SEQ ID NO: 165867 - DNA, 20 bp, Homo sapiens
  source 1..20: mol_type = genomic DNA
ccttgggacatagctttgtt

SEQ ID NO: 165868 - DNA, 20 bp, Homo sapiens
  source 1..20: mol_type = genomic DNA
cttgggacatagctttgtta

SEQ ID NO: 165869 - DNA, 20 bp, Homo sapiens
  source 1..20: mol_type = genomic DNA
ttgggacatagctttgttag

SEQ ID NO: 165870 - DNA, 20 bp, Homo sapiens
  source 1..20: mol_type = genomic DNA
tgggacatagctttgttagc

SEQ ID NO: 165871 - DNA, 20 bp, Homo sapiens
  source 1..20: mol_type = genomic DNA
gggacatagctttgttagct

SEQ ID NO: 165872 - DNA, 20 bp, Homo sapiens
  source 1..20: mol_type = genomic DNA
ggacatagctttgttagcta

SEQ ID NO: 165873 - DNA, 20 bp, Homo sapiens
  source 1..20: mol_type = genomic DNA
gacatagctttgttagctat

SEQ ID NO: 165874 - DNA, 20 bp, Homo sapiens
  source 1..20: mol_type = genomic DNA
acatagctttgttagctatg

SEQ ID NO: 165875 - DNA, 20 bp, Homo sapiens
  source 1..20: mol_type = genomic DNA
catagctttgttagctatgc

SEQ ID NO: 165876 - DNA, 20 bp, Homo sapiens
  source 1..20: mol_type = genomic DNA
atagctttgttagctatgcc

SEQ ID NO: 165877 - DNA, 20 bp, Homo sapiens
  source 1..20: mol_type = genomic DNA
tagctttgttagctatgcca

SEQ ID NO: 165878 - DNA, 20 bp, Homo sapiens
  source 1..20: mol_type = genomic DNA
agctttgttagctatgccag

SEQ ID NO: 165879 - DNA, 20 bp, Homo sapiens
  source 1..20: mol_type = genomic DNA
gctttgttagctatgccagt

SEQ ID NO: 165880 - DNA, 20 bp, Homo sapiens
  source 1..20: mol_type = genomic DNA
ctttgttagctatgccagta

SEQ ID NO: 165881 - DNA, 20 bp, Homo sapiens
  source 1..20: mol_type = genomic DNA
tttgttagctatgccagtaa

SEQ ID NO: 165882 - DNA, 20 bp, Homo sapiens
  source 1..20: mol_type = genomic DNA
ttgttagctatgccagtaat

SEQ ID NO: 165883 - DNA, 20 bp, Homo sapiens
  source 1..20: mol_type = genomic DNA
tgttagctatgccagtaatt

SEQ ID NO: 165884 - DNA, 20 bp, Homo sapiens
  source 1..20: mol_type = genomic DNA
gttagctatgccagtaatta

SEQ ID NO: 165885 - DNA, 20 bp, Homo sapiens
  source 1..20: mol_type = genomic DNA
ttagctatgccagtaattaa

SEQ ID NO: 165886 - DNA, 20 bp, Homo sapiens
  source 1..20: mol_type = genomic DNA
tagctatgccagtaattaac

SEQ ID NO: 165887 - DNA, 20 bp, Homo sapiens
  source 1..20: mol_type = genomic DNA
agctatgccagtaattaaca

SEQ ID NO: 165888 - DNA, 20 bp, Homo sapiens
  source 1..20: mol_type = genomic DNA
gctatgccagtaattaacag

SEQ ID NO: 165889 - DNA, 20 bp, Homo sapiens
  source 1..20: mol_type = genomic DNA
ctatgccagtaattaacagg

SEQ ID NO: 165890 - DNA, 20 bp, Homo sapiens
  source 1..20: mol_type = genomic DNA
tatgccagtaattaacaggc

SEQ ID NO: 165891 - DNA, 20 bp, Homo sapiens
  source 1..20: mol_type = genomic DNA
atgccagtaattaacaggca

SEQ ID NO: 165892 - DNA, 20 bp, Homo sapiens
  source 1..20: mol_type = genomic DNA
tgccagtaattaacaggcat

SEQ ID NO: 165893 - DNA, 20 bp, Homo sapiens
  source 1..20: mol_type = genomic DNA
gccagtaattaacaggcata

SEQ ID NO: 165894 - DNA, 20 bp, Homo sapiens
  source 1..20: mol_type = genomic DNA
ccagtaattaacaggcataa

SEQ ID NO: 165895 - DNA, 20 bp, Homo sapiens
  source 1..20: mol_type = genomic DNA
cagtaattaacaggcataac

SEQ ID NO: 165896 - DNA, 20 bp, Homo sapiens
  source 1..20: mol_type = genomic DNA
agtaattaacaggcataact

SEQ ID NO: 165897 - DNA, 20 bp, Homo sapiens
  source 1..20: mol_type = genomic DNA
gtaattaacaggcataactc

SEQ ID NO: 165898 - DNA, 20 bp, Homo sapiens
  source 1..20: mol_type = genomic DNA
taattaacaggcataactca

SEQ ID NO: 165899 - DNA, 20 bp, Homo sapiens
  source 1..20: mol_type = genomic DNA
aattaacaggcataactcag

SEQ ID NO: 165900 - DNA, 20 bp, Homo sapiens
  source 1..20: mol_type = genomic DNA
attaacaggcataactcagt

SEQ ID NO: 165901 - DNA, 20 bp, Homo sapiens
  source 1..20: mol_type = genomic DNA
ttaacaggcataactcagta

SEQ ID NO: 165902 - DNA, 20 bp, Homo sapiens
  source 1..20: mol_type = genomic DNA
taacaggcataactcagtaa

SEQ ID NO: 165903 - DNA, 20 bp, Homo sapiens
  source 1..20: mol_type = genomic DNA
aacaggcataactcagtaac

SEQ ID NO: 165904 - DNA, 20 bp, Homo sapiens
  source 1..20: mol_type = genomic DNA
acaggcataactcagtaact

SEQ ID NO: 165905 - DNA, 20 bp, Homo sapiens
  source 1..20: mol_type = genomic DNA
caggcataactcagtaactg

SEQ ID NO: 165906 - DNA, 20 bp, Homo sapiens
  source 1..20: mol_type = genomic DNA
aggcataactcagtaactga

SEQ ID NO: 165907 - DNA, 20 bp, Homo sapiens
  source 1..20: mol_type = genomic DNA
ggcataactcagtaactgag

SEQ ID NO: 165908 - DNA, 20 bp, Homo sapiens
  source 1..20: mol_type = genomic DNA
gcataactcagtaactgaga

SEQ ID NO: 165909 - DNA, 20 bp, Homo sapiens
  source 1..20: mol_type = genomic DNA
cataactcagtaactgagag

SEQ ID NO: 165910 - DNA, 20 bp, Homo sapiens
  source 1..20: mol_type = genomic DNA
ataactcagtaactgagagt

SEQ ID NO: 165911 - DNA, 20 bp, Homo sapiens
  source 1..20: mol_type = genomic DNA
taactcagtaactgagagtt

SEQ ID NO: 165912 - DNA, 20 bp, Homo sapiens
  source 1..20: mol_type = genomic DNA
aactcagtaactgagagttt

SEQ ID NO: 165913 - DNA, 20 bp, Homo sapiens
  source 1..20: mol_type = genomic DNA
actcagtaactgagagttta

SEQ ID NO: 165914 - DNA, 20 bp, Homo sapiens
  source 1..20: mol_type = genomic DNA
ctcagtaactgagagtttac

SEQ ID NO: 165915 - DNA, 20 bp, Homo sapiens
  source 1..20: mol_type = genomic DNA
tcagtaactgagagtttacc

SEQ ID NO: 165916 - DNA, 20 bp, Homo sapiens
  source 1..20: mol_type = genomic DNA
cagtaactgagagtttaccc

SEQ ID NO: 165917 - DNA, 20 bp, Homo sapiens
  source 1..20: mol_type = genomic DNA
agtaactgagagtttaccct

SEQ ID NO: 165918 - DNA, 20 bp, Homo sapiens
  source 1..20: mol_type = genomic DNA
gtaactgagagtttaccctt

SEQ ID NO: 165919 - DNA, 20 bp, Homo sapiens
  source 1..20: mol_type = genomic DNA
taactgagagtttacccttt

SEQ ID NO: 165920 - DNA, 20 bp, Homo sapiens
  source 1..20: mol_type = genomic DNA
aactgagagtttaccctttg

SEQ ID NO: 165921 - DNA, 20 bp, Homo sapiens
  source 1..20: mol_type = genomic DNA
actgagagtttaccctttgg

SEQ ID NO: 165922 - DNA, 20 bp, Homo sapiens
  source 1..20: mol_type = genomic DNA
ctgagagtttaccctttggt

SEQ ID NO: 165923 - DNA, 20 bp, Homo sapiens
  source 1..20: mol_type = genomic DNA
tgagagtttaccctttggta

SEQ ID NO: 165924 - DNA, 20 bp, Homo sapiens
  source 1..20: mol_type = genomic DNA
gagagtttaccctttggtac

SEQ ID NO: 165925 - DNA, 20 bp, Homo sapiens
  source 1..20: mol_type = genomic DNA
agagtttaccctttggtact

SEQ ID NO: 165926 - DNA, 20 bp, Homo sapiens
  source 1..20: mol_type = genomic DNA
gagtttaccctttggtactt

SEQ ID NO: 165927 - DNA, 20 bp, Homo sapiens
  source 1..20: mol_type = genomic DNA
agtttaccctttggtacttc

SEQ ID NO: 165928 - DNA, 20 bp, Homo sapiens
  source 1..20: mol_type = genomic DNA
gtttaccctttggtacttct

SEQ ID NO: 165929 - DNA, 20 bp, Homo sapiens
  source 1..20: mol_type = genomic DNA
tttaccctttggtacttctg

SEQ ID NO: 165930 - DNA, 20 bp, Homo sapiens
  source 1..20: mol_type = genomic DNA
ttaccctttggtacttctga

SEQ ID NO: 165931 - DNA, 20 bp, Homo sapiens
  source 1..20: mol_type = genomic DNA
taccctttggtacttctgaa

SEQ ID NO: 165932 - DNA, 20 bp, Homo sapiens
  source 1..20: mol_type = genomic DNA
accctttggtacttctgaaa

SEQ ID NO: 165933 - DNA, 20 bp, Homo sapiens
  source 1..20: mol_type = genomic DNA
ccctttggtacttctgaaat

SEQ ID NO: 165934 - DNA, 20 bp, Homo sapiens
  source 1..20: mol_type = genomic DNA
cctttggtacttctgaaatc

SEQ ID NO: 165935 - DNA, 20 bp, Homo sapiens
  source 1..20: mol_type = genomic DNA
ctttggtacttctgaaatca

SEQ ID NO: 165936 - DNA, 20 bp, Homo sapiens
  source 1..20: mol_type = genomic DNA
tttggtacttctgaaatcag

SEQ ID NO: 165937 - DNA, 20 bp, Homo sapiens
  source 1..20: mol_type = genomic DNA
ttggtacttctgaaatcagg

SEQ ID NO: 165938 - DNA, 20 bp, Homo sapiens
  source 1..20: mol_type = genomic DNA
tggtacttctgaaatcaggt

SEQ ID NO: 165939 - DNA, 20 bp, Homo sapiens
  source 1..20: mol_type = genomic DNA
ggtacttctgaaatcaggtg

SEQ ID NO: 165940 - DNA, 20 bp, Homo sapiens
  source 1..20: mol_type = genomic DNA
gtacttctgaaatcaggtgc

SEQ ID NO: 165941 - DNA, 20 bp, Homo sapiens
  source 1..20: mol_type = genomic DNA
tacttctgaaatcaggtgca

SEQ ID NO: 165942 - DNA, 20 bp, Homo sapiens
  source 1..20: mol_type = genomic DNA
acttctgaaatcaggtgcag

SEQ ID NO: 165943 - DNA, 20 bp, Homo sapiens
  source 1..20: mol_type = genomic DNA
cttctgaaatcaggtgcagc

SEQ ID NO: 165944 - DNA, 20 bp, Homo sapiens
  source 1..20: mol_type = genomic DNA
ttctgaaatcaggtgcagcc

SEQ ID NO: 165945 - DNA, 20 bp, Homo sapiens
  source 1..20: mol_type = genomic DNA
tctgaaatcaggtgcagccc

SEQ ID NO: 165946 - DNA, 20 bp, Homo sapiens
  source 1..20: mol_type = genomic DNA
ctgaaatcaggtgcagcccc

SEQ ID NO: 165947 - DNA, 20 bp, Homo sapiens
  source 1..20: mol_type = genomic DNA
tgaaatcaggtgcagcccca

SEQ ID NO: 165948 - DNA, 20 bp, Homo sapiens
  source 1..20: mol_type = genomic DNA
gaaatcaggtgcagccccat

SEQ ID NO: 165949 - DNA, 20 bp, Homo sapiens
  source 1..20: mol_type = genomic DNA
aaatcaggtgcagccccatc

SEQ ID NO: 165950 - DNA, 20 bp, Homo sapiens
  source 1..20: mol_type = genomic DNA
aatcaggtgcagccccatct

SEQ ID NO: 165951 - DNA, 20 bp, Homo sapiens
  source 1..20: mol_type = genomic DNA
atcaggtgcagccccatctt

SEQ ID NO: 165952 - DNA, 20 bp, Homo sapiens
  source 1..20: mol_type = genomic DNA
tcaggtgcagccccatcttt

SEQ ID NO: 165953 - DNA, 20 bp, Homo sapiens
  source 1..20: mol_type = genomic DNA
caggtgcagccccatctttc

SEQ ID NO: 165954 - DNA, 20 bp, Homo sapiens
  source 1..20: mol_type = genomic DNA
aggtgcagccccatctttct

SEQ ID NO: 165955 - DNA, 20 bp, Homo sapiens
  source 1..20: mol_type = genomic DNA
ggtgcagccccatctttctt

SEQ ID NO: 165956 - DNA, 20 bp, Homo sapiens
  source 1..20: mol_type = genomic DNA
gtgcagccccatctttcttc

SEQ ID NO: 165957 - DNA, 20 bp, Homo sapiens
  source 1..20: mol_type = genomic DNA
tgcagccccatctttcttcc

SEQ ID NO: 165958 - DNA, 20 bp, Homo sapiens
  source 1..20: mol_type = genomic DNA
gcagccccatctttcttccc

SEQ ID NO: 165959 - DNA, 20 bp, Homo sapiens
  source 1..20: mol_type = genomic DNA
cagccccatctttcttccca

SEQ ID NO: 165960 - DNA, 20 bp, Homo sapiens
  source 1..20: mol_type = genomic DNA
agccccatctttcttcccag

SEQ ID NO: 165961 - DNA, 20 bp, Homo sapiens
  source 1..20: mol_type = genomic DNA
gccccatctttcttcccaga

SEQ ID NO: 165962 - DNA, 20 bp, Homo sapiens
  source 1..20: mol_type = genomic DNA
ccccatctttcttcccagag

SEQ ID NO: 165963 - DNA, 20 bp, Homo sapiens
  source 1..20: mol_type = genomic DNA
cccatctttcttcccagagc

SEQ ID NO: 165964 - DNA, 20 bp, Homo sapiens
  source 1..20: mol_type = genomic DNA
ccatctttcttcccagagca

SEQ ID NO: 165965 - DNA, 20 bp, Homo sapiens
  source 1..20: mol_type = genomic DNA
catctttcttcccagagcat

SEQ ID NO: 165966 - DNA, 20 bp, Homo sapiens
  source 1..20: mol_type = genomic DNA
atctttcttcccagagcatt

SEQ ID NO: 165967 - DNA, 20 bp, Homo sapiens
  source 1..20: mol_type = genomic DNA
tctttcttcccagagcatta

SEQ ID NO: 165968 - DNA, 20 bp, Homo sapiens
  source 1..20: mol_type = genomic DNA
ctttcttcccagagcattag

SEQ ID NO: 165969 - DNA, 20 bp, Homo sapiens
  source 1..20: mol_type = genomic DNA
tttcttcccagagcattagt

SEQ ID NO: 165970 - DNA, 20 bp, Homo sapiens
  source 1..20: mol_type = genomic DNA
ttcttcccagagcattagtg

SEQ ID NO: 165971 - DNA, 20 bp, Homo sapiens
  source 1..20: mol_type = genomic DNA
tcttcccagagcattagtgt

SEQ ID NO: 165972 - DNA, 20 bp, Homo sapiens
  source 1..20: mol_type = genomic DNA
cttcccagagcattagtgtg

SEQ ID NO: 165973 - DNA, 20 bp, Homo sapiens
  source 1..20: mol_type = genomic DNA
ttcccagagcattagtgtgt

SEQ ID NO: 165974 - DNA, 20 bp, Homo sapiens
  source 1..20: mol_type = genomic DNA
tcccagagcattagtgtgta

SEQ ID NO: 165975 - DNA, 20 bp, Homo sapiens
  source 1..20: mol_type = genomic DNA
cccagagcattagtgtgtag

SEQ ID NO: 165976 - DNA, 20 bp, Homo sapiens
  source 1..20: mol_type = genomic DNA
ccagagcattagtgtgtaga

SEQ ID NO: 165977 - DNA, 20 bp, Homo sapiens
  source 1..20: mol_type = genomic DNA
cagagcattagtgtgtagac

SEQ ID NO: 165978 - DNA, 20 bp, Homo sapiens
  source 1..20: mol_type = genomic DNA
agagcattagtgtgtagacg

SEQ ID NO: 165979 - DNA, 20 bp, Homo sapiens
  source 1..20: mol_type = genomic DNA
gagcattagtgtgtagacgt

SEQ ID NO: 165980 - DNA, 20 bp, Homo sapiens
  source 1..20: mol_type = genomic DNA
agcattagtgtgtagacgtg

SEQ ID NO: 165981 - DNA, 20 bp, Homo sapiens
  source 1..20: mol_type = genomic DNA
gcattagtgtgtagacgtga

SEQ ID NO: 165982 - DNA, 20 bp, Homo sapiens
  source 1..20: mol_type = genomic DNA
cattagtgtgtagacgtgaa

SEQ ID NO: 165983 - DNA, 20 bp, Homo sapiens
  source 1..20: mol_type = genomic DNA
attagtgtgtagacgtgaag

SEQ ID NO: 165984 - DNA, 20 bp, Homo sapiens
  source 1..20: mol_type = genomic DNA
ttagtgtgtagacgtgaagc

SEQ ID NO: 165985 - DNA, 20 bp, Homo sapiens
  source 1..20: mol_type = genomic DNA
tagtgtgtagacgtgaagcc

SEQ ID NO: 165986 - DNA, 20 bp, Homo sapiens
  source 1..20: mol_type = genomic DNA
agtgtgtagacgtgaagcct

SEQ ID NO: 165987 - DNA, 20 bp, Homo sapiens
  source 1..20: mol_type = genomic DNA
gtgtgtagacgtgaagcctt

SEQ ID NO: 165988 - DNA, 20 bp, Homo sapiens
  source 1..20: mol_type = genomic DNA
tgtgtagacgtgaagccttg

SEQ ID NO: 165989 - DNA, 20 bp, Homo sapiens
  source 1..20: mol_type = genomic DNA
gtgtagacgtgaagccttgt

SEQ ID NO: 165990 - DNA, 20 bp, Homo sapiens
  source 1..20: mol_type = genomic DNA
tgtagacgtgaagccttgtt

SEQ ID NO: 165991 - DNA, 20 bp, Homo sapiens
  source 1..20: mol_type = genomic DNA
gtagacgtgaagccttgttt

SEQ ID NO: 165992 - DNA, 20 bp, Homo sapiens
  source 1..20: mol_type = genomic DNA
tagacgtgaagccttgtttg

SEQ ID NO: 165993 - DNA, 20 bp, Homo sapiens
  source 1..20: mol_type = genomic DNA
agacgtgaagccttgtttga

SEQ ID NO: 165994 - DNA, 20 bp, Homo sapiens
  source 1..20: mol_type = genomic DNA
gacgtgaagccttgtttgaa

SEQ ID NO: 165995 - DNA, 20 bp, Homo sapiens
  source 1..20: mol_type = genomic DNA
acgtgaagccttgtttgaag

SEQ ID NO: 165996 - DNA, 20 bp, Homo sapiens
  source 1..20: mol_type = genomic DNA
cgtgaagccttgtttgaaga

SEQ ID NO: 165997 - DNA, 20 bp, Homo sapiens
  source 1..20: mol_type = genomic DNA
gtgaagccttgtttgaagag

SEQ ID NO: 165998 - DNA, 20 bp, Homo sapiens
  source 1..20: mol_type = genomic DNA
tgaagccttgtttgaagagc

SEQ ID NO: 165999 - DNA, 20 bp, Homo sapiens
  source 1..20: mol_type = genomic DNA
gaagccttgtttgaagagct

SEQ ID NO: 166000 - DNA, 20 bp, Homo sapiens
  source 1..20: mol_type = genomic DNA
aagccttgtttgaagagctg

SEQ ID NO: 166001 - DNA, 20 bp, Homo sapiens
  source 1..20: mol_type = genomic DNA
agccttgtttgaagagctgt

SEQ ID NO: 166002 - DNA, 20 bp, Homo sapiens
  source 1..20: mol_type = genomic DNA
gccttgtttgaagagctgta

SEQ ID NO: 166003 - DNA, 20 bp, Homo sapiens
  source 1..20: mol_type = genomic DNA
ccttgtttgaagagctgtat

SEQ ID NO: 166004 - DNA, 20 bp, Homo sapiens
  source 1..20: mol_type = genomic DNA
cttgtttgaagagctgtatt

SEQ ID NO: 166005 - DNA, 20 bp, Homo sapiens
  source 1..20: mol_type = genomic DNA
ttgtttgaagagctgtattt

SEQ ID NO: 166006 - DNA, 20 bp, Homo sapiens
  source 1..20: mol_type = genomic DNA
tgtttgaagagctgtattta

SEQ ID NO: 166007 - DNA, 20 bp, Homo sapiens
  source 1..20: mol_type = genomic DNA
gtttgaagagctgtatttag

SEQ ID NO: 166008 - DNA, 20 bp, Homo sapiens
  source 1..20: mol_type = genomic DNA
tttgaagagctgtatttaga

SEQ ID NO: 166009 - DNA, 20 bp, Homo sapiens
  source 1..20: mol_type = genomic DNA
ttgaagagctgtatttagaa

SEQ ID NO: 166010 - DNA, 20 bp, Homo sapiens
  source 1..20: mol_type = genomic DNA
tgaagagctgtatttagaat

SEQ ID NO: 166011 - DNA, 20 bp, Homo sapiens
  source 1..20: mol_type = genomic DNA
gaagagctgtatttagaatg

SEQ ID NO: 166012 - DNA, 20 bp, Homo sapiens
  source 1..20: mol_type = genomic DNA
aagagctgtatttagaatgc

SEQ ID NO: 166013 - DNA, 20 bp, Homo sapiens
  source 1..20: mol_type = genomic DNA
agagctgtatttagaatgcc

SEQ ID NO: 166014 - DNA, 20 bp, Homo sapiens
  source 1..20: mol_type = genomic DNA
gagctgtatttagaatgcct

SEQ ID NO: 166015 - DNA, 20 bp, Homo sapiens
  source 1..20: mol_type = genomic DNA
agctgtatttagaatgccta

SEQ ID NO: 166016 - DNA, 20 bp, Homo sapiens
  source 1..20: mol_type = genomic DNA
gctgtatttagaatgcctag

SEQ ID NO: 166017 - DNA, 20 bp, Homo sapiens
  source 1..20: mol_type = genomic DNA
ctgtatttagaatgcctagc

SEQ ID NO: 166018 - DNA, 20 bp, Homo sapiens
  source 1..20: mol_type = genomic DNA
tgtatttagaatgcctagct

SEQ ID NO: 166019 - DNA, 20 bp, Homo sapiens
  source 1..20: mol_type = genomic DNA
gtatttagaatgcctagcta

SEQ ID NO: 166020 - DNA, 20 bp, Homo sapiens
  source 1..20: mol_type = genomic DNA
tatttagaatgcctagctac

SEQ ID NO: 166021 - DNA, 20 bp, Homo sapiens
  source 1..20: mol_type = genomic DNA
atttagaatgcctagctact

SEQ ID NO: 166022 - DNA, 20 bp, Homo sapiens
  source 1..20: mol_type = genomic DNA
tttagaatgcctagctactt

SEQ ID NO: 166023 - DNA, 20 bp, Homo sapiens
  source 1..20: mol_type = genomic DNA
ttagaatgcctagctacttg

SEQ ID NO: 166024 - DNA, 20 bp, Homo sapiens
  source 1..20: mol_type = genomic DNA
tagaatgcctagctacttgt

SEQ ID NO: 166025 - DNA, 20 bp, Homo sapiens
  source 1..20: mol_type = genomic DNA
agaatgcctagctacttgtt

SEQ ID NO: 166026 - DNA, 20 bp, Homo sapiens
  source 1..20: mol_type = genomic DNA
gaatgcctagctacttgttt

SEQ ID NO: 166027 - DNA, 20 bp, Homo sapiens
  source 1..20: mol_type = genomic DNA
aatgcctagctacttgtttg

SEQ ID NO: 166028 - DNA, 20 bp, Homo sapiens
  source 1..20: mol_type = genomic DNA
atgcctagctacttgtttgc

SEQ ID NO: 166029 - DNA, 20 bp, Homo sapiens
  source 1..20: mol_type = genomic DNA
tgcctagctacttgtttgca

SEQ ID NO: 166030 - DNA, 20 bp, Homo sapiens
  source 1..20: mol_type = genomic DNA
gcctagctacttgtttgcaa

SEQ ID NO: 166031 - DNA, 20 bp, Homo sapiens
  source 1..20: mol_type = genomic DNA
cctagctacttgtttgcaaa

SEQ ID NO: 166032 - DNA, 20 bp, Homo sapiens
  source 1..20: mol_type = genomic DNA
ctagctacttgtttgcaaat

SEQ ID NO: 166033 - DNA, 20 bp, Homo sapiens
  source 1..20: mol_type = genomic DNA
tagctacttgtttgcaaatt

SEQ ID NO: 166034 - DNA, 20 bp, Homo sapiens
  source 1..20: mol_type = genomic DNA
agctacttgtttgcaaattt

SEQ ID NO: 166035 - DNA, 20 bp, Homo sapiens
  source 1..20: mol_type = genomic DNA
gctacttgtttgcaaatttg

SEQ ID NO: 166036 - DNA, 20 bp, Homo sapiens
  source 1..20: mol_type = genomic DNA
ctacttgtttgcaaatttgt

SEQ ID NO: 166037 - DNA, 20 bp, Homo sapiens
  source 1..20: mol_type = genomic DNA
tacttgtttgcaaatttgtg

SEQ ID NO: 166038 - DNA, 20 bp, Homo sapiens
  source 1..20: mol_type = genomic DNA
acttgtttgcaaatttgtgt

SEQ ID NO: 166039 - DNA, 20 bp, Homo sapiens
  source 1..20: mol_type = genomic DNA
cttgtttgcaaatttgtgtc

SEQ ID NO: 166040 - DNA, 20 bp, Homo sapiens
  source 1..20: mol_type = genomic DNA
ttgtttgcaaatttgtgtct

SEQ ID NO: 166041 - DNA, 20 bp, Homo sapiens
  source 1..20: mol_type = genomic DNA
tgtttgcaaatttgtgtcta

SEQ ID NO: 166042 - DNA, 20 bp, Homo sapiens
  source 1..20: mol_type = genomic DNA
gtttgcaaatttgtgtctac

SEQ ID NO: 166043 - DNA, 20 bp, Homo sapiens
  source 1..20: mol_type = genomic DNA
tttgcaaatttgtgtctact

SEQ ID NO: 166044 - DNA, 20 bp, Homo sapiens
  source 1..20: mol_type = genomic DNA
ttgcaaatttgtgtctactc

SEQ ID NO: 166045 - DNA, 20 bp, Homo sapiens
  source 1..20: mol_type = genomic DNA
tgcaaatttgtgtctactca

SEQ ID NO: 166046 - DNA, 20 bp, Homo sapiens
  source 1..20: mol_type = genomic DNA
gcaaatttgtgtctactcag

SEQ ID NO: 166047 - DNA, 20 bp, Homo sapiens
  source 1..20: mol_type = genomic DNA
caaatttgtgtctactcagt

SEQ ID NO: 166048 - DNA, 20 bp, Homo sapiens
  source 1..20: mol_type = genomic DNA
aaatttgtgtctactcagtc

SEQ ID NO: 166049 - DNA, 20 bp, Homo sapiens
  source 1..20: mol_type = genomic DNA
aatttgtgtctactcagtca

SEQ ID NO: 166050 - DNA, 20 bp, Homo sapiens
  source 1..20: mol_type = genomic DNA
atttgtgtctactcagtcaa

SEQ ID NO: 166051 - DNA, 20 bp, Homo sapiens
  source 1..20: mol_type = genomic DNA
tttgtgtctactcagtcaag

SEQ ID NO: 166052 - DNA, 20 bp, Homo sapiens
  source 1..20: mol_type = genomic DNA
ttgtgtctactcagtcaagt

SEQ ID NO: 166053 - DNA, 20 bp, Homo sapiens
  source 1..20: mol_type = genomic DNA
tgtgtctactcagtcaagtt

SEQ ID NO: 166054 - DNA, 20 bp, Homo sapiens
  source 1..20: mol_type = genomic DNA
gtgtctactcagtcaagttt

SEQ ID NO: 166055 - DNA, 20 bp, Homo sapiens
  source 1..20: mol_type = genomic DNA
tgtctactcagtcaagtttt

SEQ ID NO: 166056 - DNA, 20 bp, Homo sapiens
  source 1..20: mol_type = genomic DNA
gtctactcagtcaagtttta

SEQ ID NO: 166057 - DNA, 20 bp, Homo sapiens
  source 1..20: mol_type = genomic DNA
tctactcagtcaagttttaa

SEQ ID NO: 166058 - DNA, 20 bp, Homo sapiens
  source 1..20: mol_type = genomic DNA
ctactcagtcaagttttaat

SEQ ID NO: 166059 - DNA, 20 bp, Homo sapiens
  source 1..20: mol_type = genomic DNA
tactcagtcaagttttaatt

SEQ ID NO: 166060 - DNA, 20 bp, Homo sapiens
  source 1..20: mol_type = genomic DNA
actcagtcaagttttaattt

SEQ ID NO: 166061 - DNA, 20 bp, Homo sapiens
  source 1..20: mol_type = genomic DNA
ctcagtcaagttttaattta

SEQ ID NO: 166062 - DNA, 20 bp, Homo sapiens
  source 1..20: mol_type = genomic DNA
tcagtcaagttttaatttag

SEQ ID NO: 166063 - DNA, 20 bp, Homo sapiens
  source 1..20: mol_type = genomic DNA
cagtcaagttttaatttagc

SEQ ID NO: 166064 - DNA, 20 bp, Homo sapiens
  source 1..20: mol_type = genomic DNA
agtcaagttttaatttagct

SEQ ID NO: 166065 - DNA, 20 bp, Homo sapiens
  source 1..20: mol_type = genomic DNA
gtcaagttttaatttagctc

SEQ ID NO: 166066 - DNA, 20 bp, Homo sapiens
  source 1..20: mol_type = genomic DNA
tcaagttttaatttagctca

SEQ ID NO: 166067 - DNA, 20 bp, Homo sapiens
  source 1..20: mol_type = genomic DNA
caagttttaatttagctcat

SEQ ID NO: 166068 - DNA, 20 bp, Homo sapiens
  source 1..20: mol_type = genomic DNA
aagttttaatttagctcatg

SEQ ID NO: 166069 - DNA, 20 bp, Homo sapiens
  source 1..20: mol_type = genomic DNA
agttttaatttagctcatga

SEQ ID NO: 166070 - DNA, 20 bp, Homo sapiens
  source 1..20: mol_type = genomic DNA
gttttaatttagctcatgaa

SEQ ID NO: 166071 - DNA, 20 bp, Homo sapiens
  source 1..20: mol_type = genomic DNA
ttttaatttagctcatgaac

SEQ ID NO: 166072 - DNA, 20 bp, Homo sapiens
  source 1..20: mol_type = genomic DNA
tttaatttagctcatgaact

SEQ ID NO: 166073 - DNA, 20 bp, Homo sapiens
  source 1..20: mol_type = genomic DNA
ttaatttagctcatgaacta

SEQ ID NO: 166074 - DNA, 20 bp, Homo sapiens
  source 1..20: mol_type = genomic DNA
taatttagctcatgaactac

SEQ ID NO: 166075 - DNA, 20 bp, Homo sapiens
  source 1..20: mol_type = genomic DNA
aatttagctcatgaactacc

SEQ ID NO: 166076 - DNA, 20 bp, Homo sapiens
  source 1..20: mol_type = genomic DNA
atttagctcatgaactacct

SEQ ID NO: 166077 - DNA, 20 bp, Homo sapiens
  source 1..20: mol_type = genomic DNA
tttagctcatgaactacctt

SEQ ID NO: 166078 - DNA, 20 bp, Homo sapiens
  source 1..20: mol_type = genomic DNA
ttagctcatgaactaccttg

SEQ ID NO: 166079 - DNA, 20 bp, Homo sapiens
  source 1..20: mol_type = genomic DNA
tagctcatgaactaccttga

SEQ ID NO: 166080 - DNA, 20 bp, Homo sapiens
  source 1..20: mol_type = genomic DNA
agctcatgaactaccttgat

SEQ ID NO: 166081 - DNA, 20 bp, Homo sapiens
  source 1..20: mol_type = genomic DNA
gctcatgaactaccttgatg

SEQ ID NO: 166082 - DNA, 20 bp, Homo sapiens
  source 1..20: mol_type = genomic DNA
ctcatgaactaccttgatgt

SEQ ID NO: 166083 - DNA, 20 bp, Homo sapiens
  source 1..20: mol_type = genomic DNA
tcatgaactaccttgatgtt

SEQ ID NO: 166084 - DNA, 20 bp, Homo sapiens
  source 1..20: mol_type = genomic DNA
catgaactaccttgatgttt

SEQ ID NO: 166085 - DNA, 20 bp, Homo sapiens
  source 1..20: mol_type = genomic DNA
atgaactaccttgatgttta

SEQ ID NO: 166086 - DNA, 20 bp, Homo sapiens
  source 1..20: mol_type = genomic DNA
tgaactaccttgatgtttag

SEQ ID NO: 166087 - DNA, 20 bp, Homo sapiens
  source 1..20: mol_type = genomic DNA
gaactaccttgatgtttagt

SEQ ID NO: 166088 - DNA, 20 bp, Homo sapiens
  source 1..20: mol_type = genomic DNA
aactaccttgatgtttagtg

SEQ ID NO: 166089 - DNA, 20 bp, Homo sapiens
  source 1..20: mol_type = genomic DNA
actaccttgatgtttagtgg

SEQ ID NO: 166090 - DNA, 20 bp, Homo sapiens
  source 1..20: mol_type = genomic DNA
ctaccttgatgtttagtggc

SEQ ID NO: 166091 - DNA, 20 bp, Homo sapiens
  source 1..20: mol_type = genomic DNA
taccttgatgtttagtggca

SEQ ID NO: 166092 - DNA, 20 bp, Homo sapiens
  source 1..20: mol_type = genomic DNA
accttgatgtttagtggcat

SEQ ID NO: 166093 - DNA, 20 bp, Homo sapiens
  source 1..20: mol_type = genomic DNA
ccttgatgtttagtggcatc

SEQ ID NO: 166094 - DNA, 20 bp, Homo sapiens
  source 1..20: mol_type = genomic DNA
cttgatgtttagtggcatca

SEQ ID NO: 166095 - DNA, 20 bp, Homo sapiens
  source 1..20: mol_type = genomic DNA
ttgatgtttagtggcatcag

SEQ ID NO: 166096 - DNA, 20 bp, Homo sapiens
  source 1..20: mol_type = genomic DNA
tgatgtttagtggcatcagc

SEQ ID NO: 166097 - DNA, 20 bp, Homo sapiens
  source 1..20: mol_type = genomic DNA
gatgtttagtggcatcagcc

SEQ ID NO: 166098 - DNA, 20 bp, Homo sapiens
  source 1..20: mol_type = genomic DNA
atgtttagtggcatcagccc

SEQ ID NO: 166099 - DNA, 20 bp, Homo sapiens
  source 1..20: mol_type = genomic DNA
tgtttagtggcatcagccct

SEQ ID NO: 166100 - DNA, 20 bp, Homo sapiens
  source 1..20: mol_type = genomic DNA
gtttagtggcatcagcccta

SEQ ID NO: 166101 - DNA, 20 bp, Homo sapiens
  source 1..20: mol_type = genomic DNA
tttagtggcatcagccctaa

SEQ ID NO: 166102 - DNA, 20 bp, Homo sapiens
  source 1..20: mol_type = genomic DNA
ttagtggcatcagccctaat

SEQ ID NO: 166103 - DNA, 20 bp, Homo sapiens
  source 1..20: mol_type = genomic DNA
tagtggcatcagccctaatc

SEQ ID NO: 166104 - DNA, 20 bp, Homo sapiens
  source 1..20: mol_type = genomic DNA
agtggcatcagccctaatcc

SEQ ID NO: 166105 - DNA, 20 bp, Homo sapiens
  source 1..20: mol_type = genomic DNA
gtggcatcagccctaatcca

SEQ ID NO: 166106 - DNA, 20 bp, Homo sapiens
  source 1..20: mol_type = genomic DNA
tggcatcagccctaatccat

SEQ ID NO: 166107 - DNA, 20 bp, Homo sapiens
  source 1..20: mol_type = genomic DNA
ggcatcagccctaatccatc

SEQ ID NO: 166108 - DNA, 20 bp, Homo sapiens
  source 1..20: mol_type = genomic DNA
gcatcagccctaatccatct

SEQ ID NO: 166109 - DNA, 20 bp, Homo sapiens
  source 1..20: mol_type = genomic DNA
catcagccctaatccatctg

SEQ ID NO: 166110 - DNA, 20 bp, Homo sapiens
  source 1..20: mol_type = genomic DNA
atcagccctaatccatctga

SEQ ID NO: 166111 - DNA, 20 bp, Homo sapiens
  source 1..20: mol_type = genomic DNA
tcagccctaatccatctgat

SEQ ID NO: 166112 - DNA, 20 bp, Homo sapiens
  source 1..20: mol_type = genomic DNA
cagccctaatccatctgatg

SEQ ID NO: 166113 - DNA, 20 bp, Homo sapiens
  source 1..20: mol_type = genomic DNA
agccctaatccatctgatgc

SEQ ID NO: 166114 - DNA, 20 bp, Homo sapiens
  source 1..20: mol_type = genomic DNA
gccctaatccatctgatgct

SEQ ID NO: 166115 - DNA, 20 bp, Homo sapiens
  source 1..20: mol_type = genomic DNA
ccctaatccatctgatgctt

SEQ ID NO: 166116 - DNA, 20 bp, Homo sapiens
  source 1..20: mol_type = genomic DNA
cctaatccatctgatgcttt

SEQ ID NO: 166117 - DNA, 20 bp, Homo sapiens
  source 1..20: mol_type = genomic DNA
ctaatccatctgatgctttt

SEQ ID NO: 166118 - DNA, 20 bp, Homo sapiens
  source 1..20: mol_type = genomic DNA
taatccatctgatgcttttt

SEQ ID NO: 166119 - DNA, 20 bp, Homo sapiens
  source 1..20: mol_type = genomic DNA
aatccatctgatgctttttc

SEQ ID NO: 166120 - DNA, 20 bp, Homo sapiens
  source 1..20: mol_type = genomic DNA
atccatctgatgctttttca

SEQ ID NO: 166121 - DNA, 20 bp, Homo sapiens
  source 1..20: mol_type = genomic DNA
tccatctgatgctttttcat

SEQ ID NO: 166122 - DNA, 20 bp, Homo sapiens
  source 1..20: mol_type = genomic DNA
ccatctgatgctttttcatt

SEQ ID NO: 166123 - DNA, 20 bp, Homo sapiens
  source 1..20: mol_type = genomic DNA
catctgatgctttttcatta

SEQ ID NO: 166124 - DNA, 20 bp, Homo sapiens
  source 1..20: mol_type = genomic DNA
atctgatgctttttcattat

SEQ ID NO: 166125 - DNA, 20 bp, Homo sapiens
  source 1..20: mol_type = genomic DNA
tctgatgctttttcattatt

SEQ ID NO: 166126 - DNA, 20 bp, Homo sapiens
  source 1..20: mol_type = genomic DNA
ctgatgctttttcattatta

SEQ ID NO: 166127 - DNA, 20 bp, Homo sapiens
  source 1..20: mol_type = genomic DNA
tgatgctttttcattattag

SEQ ID NO: 166128 - DNA, 20 bp, Homo sapiens
  source 1..20: mol_type = genomic DNA
gatgctttttcattattagg

SEQ ID NO: 166129 - DNA, 20 bp, Homo sapiens
  source 1..20: mol_type = genomic DNA
atgctttttcattattaggc

SEQ ID NO: 166130 - DNA, 20 bp, Homo sapiens
  source 1..20: mol_type = genomic DNA
tgctttttcattattaggca

SEQ ID NO: 166131 - DNA, 20 bp, Homo sapiens
  source 1..20: mol_type = genomic DNA
gctttttcattattaggcat

SEQ ID NO: 166132 - DNA, 20 bp, Homo sapiens
  source 1..20: mol_type = genomic DNA
ctttttcattattaggcatg

SEQ ID NO: 166133 - DNA, 20 bp, Homo sapiens
  source 1..20: mol_type = genomic DNA
tttttcattattaggcatgt

SEQ ID NO: 166134 - DNA, 20 bp, Homo sapiens
  source 1..20: mol_type = genomic DNA
ttttcattattaggcatgtt

SEQ ID NO: 166135 - DNA, 20 bp, Homo sapiens
  source 1..20: mol_type = genomic DNA
tttcattattaggcatgttg

SEQ ID NO: 166136 - DNA, 20 bp, Homo sapiens
  source 1..20: mol_type = genomic DNA
ttcattattaggcatgttgg

SEQ ID NO: 166137 - DNA, 20 bp, Homo sapiens
  source 1..20: mol_type = genomic DNA
tcattattaggcatgttgga

SEQ ID NO: 166138 - DNA, 20 bp, Homo sapiens
  source 1..20: mol_type = genomic DNA
cattattaggcatgttggag

SEQ ID NO: 166139 - DNA, 20 bp, Homo sapiens
  source 1..20: mol_type = genomic DNA
attattaggcatgttggaga

SEQ ID NO: 166140 - DNA, 20 bp, Homo sapiens
  source 1..20: mol_type = genomic DNA
ttattaggcatgttggagac

SEQ ID NO: 166141 - DNA, 20 bp, Homo sapiens
  source 1..20: mol_type = genomic DNA
tattaggcatgttggagact

SEQ ID NO: 166142 - DNA, 20 bp, Homo sapiens
  source 1..20: mol_type = genomic DNA
attaggcatgttggagactt

SEQ ID NO: 166143 - DNA, 20 bp, Homo sapiens
  source 1..20: mol_type = genomic DNA
ttaggcatgttggagacttg

SEQ ID NO: 166144 - DNA, 20 bp, Homo sapiens
  source 1..20: mol_type = genomic DNA
taggcatgttggagacttgg

SEQ ID NO: 166145 - DNA, 20 bp, Homo sapiens
  source 1..20: mol_type = genomic DNA
aggcatgttggagacttggg

SEQ ID NO: 166146 - DNA, 20 bp, Homo sapiens
  source 1..20: mol_type = genomic DNA
ggcatgttggagacttgggc

SEQ ID NO: 166147 - DNA, 20 bp, Homo sapiens
  source 1..20: mol_type = genomic DNA
gcatgttggagacttgggca

SEQ ID NO: 166148 - DNA, 20 bp, Homo sapiens
  source 1..20: mol_type = genomic DNA
catgttggagacttgggcaa

SEQ ID NO: 166149 - DNA, 20 bp, Homo sapiens
  source 1..20: mol_type = genomic DNA
atgttggagacttgggcaat

SEQ ID NO: 166150 - DNA, 20 bp, Homo sapiens
  source 1..20: mol_type = genomic DNA
tgttggagacttgggcaatg

SEQ ID NO: 166151 - DNA, 20 bp, Homo sapiens
  source 1..20: mol_type = genomic DNA
gttggagacttgggcaatgt

SEQ ID NO: 166152 - DNA, 20 bp, Homo sapiens
  source 1..20: mol_type = genomic DNA
ttggagacttgggcaatgtg

SEQ ID NO: 166153 - DNA, 20 bp, Homo sapiens
  source 1..20: mol_type = genomic DNA
tggagacttgggcaatgtga

SEQ ID NO: 166154 - DNA, 20 bp, Homo sapiens
  source 1..20: mol_type = genomic DNA
ggagacttgggcaatgtgac

SEQ ID NO: 166155 - DNA, 20 bp, Homo sapiens
  source 1..20: mol_type = genomic DNA
gagacttgggcaatgtgact

SEQ ID NO: 166156 - DNA, 20 bp, Homo sapiens
  source 1..20: mol_type = genomic DNA
agacttgggcaatgtgactg

SEQ ID NO: 166157 - DNA, 20 bp, Homo sapiens
  source 1..20: mol_type = genomic DNA
gacttgggcaatgtgactgc

SEQ ID NO: 166158 - DNA, 20 bp, Homo sapiens
  source 1..20: mol_type = genomic DNA
acttgggcaatgtgactgct

SEQ ID NO: 166159 - DNA, 20 bp, Homo sapiens
  source 1..20: mol_type = genomic DNA
cttgggcaatgtgactgctg

SEQ ID NO: 166160 - DNA, 20 bp, Homo sapiens
  source 1..20: mol_type = genomic DNA
ttgggcaatgtgactgctga

SEQ ID NO: 166161 - DNA, 20 bp, Homo sapiens
  source 1..20: mol_type = genomic DNA
tgggcaatgtgactgctgac

SEQ ID NO: 166162 - DNA, 20 bp, Homo sapiens
  source 1..20: mol_type = genomic DNA
gggcaatgtgactgctgaca

SEQ ID NO: 166163 - DNA, 20 bp, Homo sapiens
  source 1..20: mol_type = genomic DNA
ggcaatgtgactgctgacaa

SEQ ID NO: 166164 - DNA, 20 bp, Homo sapiens
  source 1..20: mol_type = genomic DNA
gcaatgtgactgctgacaaa

SEQ ID NO: 166165 - DNA, 20 bp, Homo sapiens
  source 1..20: mol_type = genomic DNA
caatgtgactgctgacaaag

SEQ ID NO: 166166 - DNA, 20 bp, Homo sapiens
  source 1..20: mol_type = genomic DNA
aatgtgactgctgacaaaga

SEQ ID NO: 166167 - DNA, 20 bp, Homo sapiens
  source 1..20: mol_type = genomic DNA
atgtgactgctgacaaagat

SEQ ID NO: 166168 - DNA, 20 bp, Homo sapiens
  source 1..20: mol_type = genomic DNA
tgtgactgctgacaaagatg

SEQ ID NO: 166169 - DNA, 20 bp, Homo sapiens
  source 1..20: mol_type = genomic DNA
gtgactgctgacaaagatgg

SEQ ID NO: 166170 - DNA, 20 bp, Homo sapiens
  source 1..20: mol_type = genomic DNA
tgactgctgacaaagatggt

SEQ ID NO: 166171 - DNA, 20 bp, Homo sapiens
  source 1..20: mol_type = genomic DNA
gactgctgacaaagatggtg

SEQ ID NO: 166172 - DNA, 20 bp, Homo sapiens
  source 1..20: mol_type = genomic DNA
actgctgacaaagatggtgt

SEQ ID NO: 166173 - DNA, 20 bp, Homo sapiens
  source 1..20: mol_type = genomic DNA
ctgctgacaaagatggtgtg

SEQ ID NO: 166174 - DNA, 20 bp, Homo sapiens
  source 1..20: mol_type = genomic DNA
tgctgacaaagatggtgtgg

SEQ ID NO: 166175 - DNA, 20 bp, Homo sapiens
  source 1..20: mol_type = genomic DNA
gctgacaaagatggtgtggc

SEQ ID NO: 166176 - DNA, 20 bp, Homo sapiens
  source 1..20: mol_type = genomic DNA
ctgacaaagatggtgtggcc

SEQ ID NO: 166177 - DNA, 20 bp, Homo sapiens
  source 1..20: mol_type = genomic DNA
tgacaaagatggtgtggccg

SEQ ID NO: 166178 - DNA, 20 bp, Homo sapiens
  source 1..20: mol_type = genomic DNA
gacaaagatggtgtggccga

SEQ ID NO: 166179 - DNA, 20 bp, Homo sapiens
  source 1..20: mol_type = genomic DNA
acaaagatggtgtggccgat

SEQ ID NO: 166180 - DNA, 20 bp, Homo sapiens
  source 1..20: mol_type = genomic DNA
caaagatggtgtggccgatg

SEQ ID NO: 166181 - DNA, 20 bp, Homo sapiens
  source 1..20: mol_type = genomic DNA
aaagatggtgtggccgatgt

SEQ ID NO: 166182 - DNA, 20 bp, Homo sapiens
  source 1..20: mol_type = genomic DNA
aagatggtgtggccgatgtg

SEQ ID NO: 166183 - DNA, 20 bp, Homo sapiens
  source 1..20: mol_type = genomic DNA
agatggtgtggccgatgtgt

SEQ ID NO: 166184 - DNA, 20 bp, Homo sapiens
  source 1..20: mol_type = genomic DNA
gatggtgtggccgatgtgtc

SEQ ID NO: 166185 - DNA, 20 bp, Homo sapiens
  source 1..20: mol_type = genomic DNA
atggtgtggccgatgtgtct

SEQ ID NO: 166186 - DNA, 20 bp, Homo sapiens
  source 1..20: mol_type = genomic DNA
tggtgtggccgatgtgtcta

SEQ ID NO: 166187 - DNA, 20 bp, Homo sapiens
  source 1..20: mol_type = genomic DNA
ggtgtggccgatgtgtctat

SEQ ID NO: 166188 - DNA, 20 bp, Homo sapiens
  source 1..20: mol_type = genomic DNA
gtgtggccgatgtgtctatt

SEQ ID NO: 166189 - DNA, 20 bp, Homo sapiens
  source 1..20: mol_type = genomic DNA
tgtggccgatgtgtctattg

SEQ ID NO: 166190 - DNA, 20 bp, Homo sapiens
  source 1..20: mol_type = genomic DNA
gtggccgatgtgtctattga

SEQ ID NO: 166191 - DNA, 20 bp, Homo sapiens
  source 1..20: mol_type = genomic DNA
tggccgatgtgtctattgaa

SEQ ID NO: 166192 - DNA, 20 bp, Homo sapiens
  source 1..20: mol_type = genomic DNA
ggccgatgtgtctattgaag

SEQ ID NO: 166193 - DNA, 20 bp, Homo sapiens
  source 1..20: mol_type = genomic DNA
gccgatgtgtctattgaaga

SEQ ID NO: 166194 - DNA, 20 bp, Homo sapiens
  source 1..20: mol_type = genomic DNA
ccgatgtgtctattgaagat

SEQ ID NO: 166195 - DNA, 20 bp, Homo sapiens
  source 1..20: mol_type = genomic DNA
cgatgtgtctattgaagatt

SEQ ID NO: 166196 - DNA, 20 bp, Homo sapiens
  source 1..20: mol_type = genomic DNA
gatgtgtctattgaagattc

SEQ ID NO: 166197 - DNA, 20 bp, Homo sapiens
  source 1..20: mol_type = genomic DNA
atgtgtctattgaagattct

SEQ ID NO: 166198 - DNA, 20 bp, Homo sapiens
  source 1..20: mol_type = genomic DNA
tgtgtctattgaagattctg

SEQ ID NO: 166199 - DNA, 20 bp, Homo sapiens
  source 1..20: mol_type = genomic DNA
gtgtctattgaagattctgt

SEQ ID NO: 166200 - DNA, 20 bp, Homo sapiens
  source 1..20: mol_type = genomic DNA
tgtctattgaagattctgtg

SEQ ID NO: 166201 - DNA, 20 bp, Homo sapiens
  source 1..20: mol_type = genomic DNA
gtctattgaagattctgtga

SEQ ID NO: 166202 - DNA, 20 bp, Homo sapiens
  source 1..20: mol_type = genomic DNA
tctattgaagattctgtgat

SEQ ID NO: 166203 - DNA, 20 bp, Homo sapiens
  source 1..20: mol_type = genomic DNA
ctattgaagattctgtgatc

SEQ ID NO: 166204 - DNA, 20 bp, Homo sapiens
  source 1..20: mol_type = genomic DNA
tattgaagattctgtgatct

SEQ ID NO: 166205 - DNA, 20 bp, Homo sapiens
  source 1..20: mol_type = genomic DNA
attgaagattctgtgatctc

SEQ ID NO: 166206 - DNA, 20 bp, Homo sapiens
  source 1..20: mol_type = genomic DNA
ttgaagattctgtgatctca

SEQ ID NO: 166207 - DNA, 20 bp, Homo sapiens
  source 1..20: mol_type = genomic DNA
tgaagattctgtgatctcac

SEQ ID NO: 166208 - DNA, 20 bp, Homo sapiens
  source 1..20: mol_type = genomic DNA
gaagattctgtgatctcact

SEQ ID NO: 166209 - DNA, 20 bp, Homo sapiens
  source 1..20: mol_type = genomic DNA
aagattctgtgatctcactc

SEQ ID NO: 166210 - DNA, 20 bp, Homo sapiens
  source 1..20: mol_type = genomic DNA
agattctgtgatctcactct

SEQ ID NO: 166211 - DNA, 20 bp, Homo sapiens
  source 1..20: mol_type = genomic DNA
gattctgtgatctcactctc

SEQ ID NO: 166212 - DNA, 20 bp, Homo sapiens
  source 1..20: mol_type = genomic DNA
attctgtgatctcactctca

SEQ ID NO: 166213 - DNA, 20 bp, Homo sapiens
  source 1..20: mol_type = genomic DNA
ttctgtgatctcactctcag

SEQ ID NO: 166214 - DNA, 20 bp, Homo sapiens
  source 1..20: mol_type = genomic DNA
tctgtgatctcactctcagg

SEQ ID NO: 166215 - DNA, 20 bp, Homo sapiens
  source 1..20: mol_type = genomic DNA
ctgtgatctcactctcagga

SEQ ID NO: 166216 - DNA, 20 bp, Homo sapiens
  source 1..20: mol_type = genomic DNA
tgtgatctcactctcaggag

SEQ ID NO: 166217 - DNA, 20 bp, Homo sapiens
  source 1..20: mol_type = genomic DNA
gtgatctcactctcaggaga

SEQ ID NO: 166218 - DNA, 20 bp, Homo sapiens
  source 1..20: mol_type = genomic DNA
tgatctcactctcaggagac

SEQ ID NO: 166219 - DNA, 20 bp, Homo sapiens
  source 1..20: mol_type = genomic DNA
gatctcactctcaggagacc

SEQ ID NO: 166220 - DNA, 20 bp, Homo sapiens
  source 1..20: mol_type = genomic DNA
atctcactctcaggagacca

SEQ ID NO: 166221 - DNA, 20 bp, Homo sapiens
  source 1..20: mol_type = genomic DNA
tctcactctcaggagaccat

SEQ ID NO: 166222 - DNA, 20 bp, Homo sapiens
  source 1..20: mol_type = genomic DNA
ctcactctcaggagaccatt

SEQ ID NO: 166223 - DNA, 20 bp, Homo sapiens
  source 1..20: mol_type = genomic DNA
tcactctcaggagaccattg

SEQ ID NO: 166224 - DNA, 20 bp, Homo sapiens
  source 1..20: mol_type = genomic DNA
cactctcaggagaccattgc

SEQ ID NO: 166225 - DNA, 20 bp, Homo sapiens
  source 1..20: mol_type = genomic DNA
actctcaggagaccattgca

SEQ ID NO: 166226 - DNA, 20 bp, Homo sapiens
  source 1..20: mol_type = genomic DNA
ctctcaggagaccattgcat

SEQ ID NO: 166227 - DNA, 20 bp, Homo sapiens
  source 1..20: mol_type = genomic DNA
tctcaggagaccattgcatc

SEQ ID NO: 166228 - DNA, 20 bp, Homo sapiens
  source 1..20: mol_type = genomic DNA
ctcaggagaccattgcatca

SEQ ID NO: 166229 - DNA, 20 bp, Homo sapiens
  source 1..20: mol_type = genomic DNA
tcaggagaccattgcatcat

SEQ ID NO: 166230 - DNA, 20 bp, Homo sapiens
  source 1..20: mol_type = genomic DNA
caggagaccattgcatcatt

SEQ ID NO: 166231 - DNA, 20 bp, Homo sapiens
  source 1..20: mol_type = genomic DNA
aggagaccattgcatcattg

SEQ ID NO: 166232 - DNA, 20 bp, Homo sapiens
  source 1..20: mol_type = genomic DNA
ggagaccattgcatcattgg

SEQ ID NO: 166233 - DNA, 20 bp, Homo sapiens
  source 1..20: mol_type = genomic DNA
gagaccattgcatcattggc

SEQ ID NO: 166234 - DNA, 20 bp, Homo sapiens
  source 1..20: mol_type = genomic DNA
agaccattgcatcattggcc

SEQ ID NO: 166235 - DNA, 20 bp, Homo sapiens
  source 1..20: mol_type = genomic DNA
gaccattgcatcattggccg

SEQ ID NO: 166236 - DNA, 20 bp, Homo sapiens
  source 1..20: mol_type = genomic DNA
accattgcatcattggccgc

SEQ ID NO: 166237 - DNA, 20 bp, Homo sapiens
  source 1..20: mol_type = genomic DNA
ccattgcatcattggccgca

SEQ ID NO: 166238 - DNA, 20 bp, Homo sapiens
  source 1..20: mol_type = genomic DNA
cattgcatcattggccgcac

SEQ ID NO: 166239 - DNA, 20 bp, Homo sapiens
  source 1..20: mol_type = genomic DNA
attgcatcattggccgcaca

SEQ ID NO: 166240 - DNA, 20 bp, Homo sapiens
  source 1..20: mol_type = genomic DNA
ttgcatcattggccgcacac

SEQ ID NO: 166241 - DNA, 20 bp, Homo sapiens
  source 1..20: mol_type = genomic DNA
tgcatcattggccgcacact

SEQ ID NO: 166242 - DNA, 20 bp, Homo sapiens
  source 1..20: mol_type = genomic DNA
gcatcattggccgcacactg

SEQ ID NO: 166243 - DNA, 20 bp, Homo sapiens
  source 1..20: mol_type = genomic DNA
catcattggccgcacactgg

SEQ ID NO: 166244 - DNA, 20 bp, Homo sapiens
  source 1..20: mol_type = genomic DNA
atcattggccgcacactggt

SEQ ID NO: 166245 - DNA, 20 bp, Homo sapiens
  source 1..20: mol_type = genomic DNA
tcattggccgcacactggtg

SEQ ID NO: 166246 - DNA, 20 bp, Homo sapiens
  source 1..20: mol_type = genomic DNA
cattggccgcacactggtgg

SEQ ID NO: 166247 - DNA, 20 bp, Homo sapiens
  source 1..20: mol_type = genomic DNA
attggccgcacactggtggt

SEQ ID NO: 166248 - DNA, 20 bp, Homo sapiens
  source 1..20: mol_type = genomic DNA
ttggccgcacactggtggta

SEQ ID NO: 166249 - DNA, 20 bp, Homo sapiens
  source 1..20: mol_type = genomic DNA
tggccgcacactggtggtaa

SEQ ID NO: 166250 - DNA, 20 bp, Homo sapiens
  source 1..20: mol_type = genomic DNA
ggccgcacactggtggtaag

SEQ ID NO: 166251 - DNA, 20 bp, Homo sapiens
  source 1..20: mol_type = genomic DNA
gccgcacactggtggtaagt

SEQ ID NO: 166252 - DNA, 20 bp, Homo sapiens
  source 1..20: mol_type = genomic DNA
ccgcacactggtggtaagtt

SEQ ID NO: 166253 - DNA, 20 bp, Homo sapiens
  source 1..20: mol_type = genomic DNA
cgcacactggtggtaagttt

SEQ ID NO: 166254 - DNA, 20 bp, Homo sapiens
  source 1..20: mol_type = genomic DNA
gcacactggtggtaagtttt

SEQ ID NO: 166255 - DNA, 20 bp, Homo sapiens
  source 1..20: mol_type = genomic DNA
cacactggtggtaagttttc

SEQ ID NO: 166256 - DNA, 20 bp, Homo sapiens
  source 1..20: mol_type = genomic DNA
acactggtggtaagttttca

SEQ ID NO: 166257 - DNA, 20 bp, Homo sapiens
  source 1..20: mol_type = genomic DNA
cactggtggtaagttttcat

SEQ ID NO: 166258 - DNA, 20 bp, Homo sapiens
  source 1..20: mol_type = genomic DNA
actggtggtaagttttcata

SEQ ID NO: 166259 - DNA, 20 bp, Homo sapiens
  source 1..20: mol_type = genomic DNA
ctggtggtaagttttcataa

SEQ ID NO: 166260 - DNA, 20 bp, Homo sapiens
  source 1..20: mol_type = genomic DNA
tggtggtaagttttcataaa

SEQ ID NO: 166261 - DNA, 20 bp, Homo sapiens
  source 1..20: mol_type = genomic DNA
ggtggtaagttttcataaaa

SEQ ID NO: 166262 - DNA, 20 bp, Homo sapiens
  source 1..20: mol_type = genomic DNA
gtggtaagttttcataaaag

SEQ ID NO: 166263 - DNA, 20 bp, Homo sapiens
  source 1..20: mol_type = genomic DNA
tggtaagttttcataaaagg

SEQ ID NO: 166264 - DNA, 20 bp, Homo sapiens
  source 1..20: mol_type = genomic DNA
ggtaagttttcataaaagga

SEQ ID NO: 166265 - DNA, 20 bp, Homo sapiens
  source 1..20: mol_type = genomic DNA
gtaagttttcataaaaggat

SEQ ID NO: 166266 - DNA, 20 bp, Homo sapiens
  source 1..20: mol_type = genomic DNA
taagttttcataaaaggata

SEQ ID NO: 166267 - DNA, 20 bp, Homo sapiens
  source 1..20: mol_type = genomic DNA
aagttttcataaaaggatat

SEQ ID NO: 166268 - DNA, 20 bp, Homo sapiens
  source 1..20: mol_type = genomic DNA
agttttcataaaaggatatg

SEQ ID NO: 166269 - DNA, 20 bp, Homo sapiens
  source 1..20: mol_type = genomic DNA
gttttcataaaaggatatgc

SEQ ID NO: 166270 - DNA, 20 bp, Homo sapiens
  source 1..20: mol_type = genomic DNA
ttttcataaaaggatatgca

SEQ ID NO: 166271 - DNA, 20 bp, Homo sapiens
  source 1..20: mol_type = genomic DNA
tttcataaaaggatatgcat

SEQ ID NO: 166272 - DNA, 20 bp, Homo sapiens
  source 1..20: mol_type = genomic DNA
ttcataaaaggatatgcata

SEQ ID NO: 166273 - DNA, 20 bp, Homo sapiens
  source 1..20: mol_type = genomic DNA
tcataaaaggatatgcataa

SEQ ID NO: 166274 - DNA, 20 bp, Homo sapiens
  source 1..20: mol_type = genomic DNA
cataaaaggatatgcataaa

SEQ ID NO: 166275 - DNA, 20 bp, Homo sapiens
  source 1..20: mol_type = genomic DNA
ataaaaggatatgcataaaa

SEQ ID NO: 166276 - DNA, 20 bp, Homo sapiens
  source 1..20: mol_type = genomic DNA
taaaaggatatgcataaaac

SEQ ID NO: 166277 - DNA, 20 bp, Homo sapiens
  source 1..20: mol_type = genomic DNA
aaaaggatatgcataaaact

SEQ ID NO: 166278 - DNA, 20 bp, Homo sapiens
  source 1..20: mol_type = genomic DNA
aaaggatatgcataaaactt

SEQ ID NO: 166279 - DNA, 20 bp, Homo sapiens
  source 1..20: mol_type = genomic DNA
aaggatatgcataaaacttc

SEQ ID NO: 166280 - DNA, 20 bp, Homo sapiens
  source 1..20: mol_type = genomic DNA
aggatatgcataaaacttct

SEQ ID NO: 166281 - DNA, 20 bp, Homo sapiens
  source 1..20: mol_type = genomic DNA
ggatatgcataaaacttctt

SEQ ID NO: 166282 - DNA, 20 bp, Homo sapiens
  source 1..20: mol_type = genomic DNA
gatatgcataaaacttcttc

SEQ ID NO: 166283 - DNA, 20 bp, Homo sapiens
  source 1..20: mol_type = genomic DNA
atatgcataaaacttcttct

SEQ ID NO: 166284 - DNA, 20 bp, Homo sapiens
  source 1..20: mol_type = genomic DNA
tatgcataaaacttcttcta

SEQ ID NO: 166285 - DNA, 20 bp, Homo sapiens
  source 1..20: mol_type = genomic DNA
atgcataaaacttcttctaa

SEQ ID NO: 166286 - DNA, 20 bp, Homo sapiens
  source 1..20: mol_type = genomic DNA
tgcataaaacttcttctaac

SEQ ID NO: 166287 - DNA, 20 bp, Homo sapiens
  source 1..20: mol_type = genomic DNA
gcataaaacttcttctaaca

SEQ ID NO: 166288 - DNA, 20 bp, Homo sapiens
  source 1..20: mol_type = genomic DNA
cataaaacttcttctaacat

SEQ ID NO: 166289 - DNA, 20 bp, Homo sapiens
  source 1..20: mol_type = genomic DNA
ataaaacttcttctaacata

SEQ ID NO: 166290 - DNA, 20 bp, Homo sapiens
  source 1..20: mol_type = genomic DNA
taaaacttcttctaacatac

SEQ ID NO: 166291 - DNA, 20 bp, Homo sapiens
  source 1..20: mol_type = genomic DNA
aaaacttcttctaacataca

SEQ ID NO: 166292 - DNA, 20 bp, Homo sapiens
  source 1..20: mol_type = genomic DNA
aaacttcttctaacatacag

SEQ ID NO: 166293 - DNA, 20 bp, Homo sapiens
  source 1..20: mol_type = genomic DNA
aacttcttctaacatacagt

SEQ ID NO: 166294 - DNA, 20 bp, Homo sapiens
  source 1..20: mol_type = genomic DNA
acttcttctaacatacagtc

SEQ ID NO: 166295 - DNA, 20 bp, Homo sapiens
  source 1..20: mol_type = genomic DNA
cttcttctaacatacagtca

SEQ ID NO: 166296 - DNA, 20 bp, Homo sapiens
  source 1..20: mol_type = genomic DNA
ttcttctaacatacagtcat

SEQ ID NO: 166297 - DNA, 20 bp, Homo sapiens
  source 1..20: mol_type = genomic DNA
tcttctaacatacagtcatg

SEQ ID NO: 166298 - DNA, 20 bp, Homo sapiens
  source 1..20: mol_type = genomic DNA
cttctaacatacagtcatgt

SEQ ID NO: 166299 - DNA, 20 bp, Homo sapiens
  source 1..20: mol_type = genomic DNA
ttctaacatacagtcatgta

SEQ ID NO: 166300 - DNA, 20 bp, Homo sapiens
  source 1..20: mol_type = genomic DNA
tctaacatacagtcatgtat

SEQ ID NO: 166301 - DNA, 20 bp, Homo sapiens
  source 1..20: mol_type = genomic DNA
ctaacatacagtcatgtatc

SEQ ID NO: 166302 - DNA, 20 bp, Homo sapiens
  source 1..20: mol_type = genomic DNA
taacatacagtcatgtatct

SEQ ID NO: 166303 - DNA, 20 bp, Homo sapiens
  source 1..20: mol_type = genomic DNA
aacatacagtcatgtatctt

SEQ ID NO: 166304 - DNA, 20 bp, Homo sapiens
  source 1..20: mol_type = genomic DNA
acatacagtcatgtatcttt

SEQ ID NO: 166305 - DNA, 20 bp, Homo sapiens
  source 1..20: mol_type = genomic DNA
catacagtcatgtatctttt

SEQ ID NO: 166306 - DNA, 20 bp, Homo sapiens
  source 1..20: mol_type = genomic DNA
atacagtcatgtatcttttc

SEQ ID NO: 166307 - DNA, 20 bp, Homo sapiens
  source 1..20: mol_type = genomic DNA
tacagtcatgtatcttttca

SEQ ID NO: 166308 - DNA, 20 bp, Homo sapiens
  source 1..20: mol_type = genomic DNA
acagtcatgtatcttttcac

SEQ ID NO: 166309 - DNA, 20 bp, Homo sapiens
  source 1..20: mol_type = genomic DNA
cagtcatgtatcttttcact

SEQ ID NO: 166310 - DNA, 20 bp, Homo sapiens
  source 1..20: mol_type = genomic DNA
agtcatgtatcttttcactt

SEQ ID NO: 166311 - DNA, 20 bp, Homo sapiens
  source 1..20: mol_type = genomic DNA
gtcatgtatcttttcacttt

SEQ ID NO: 166312 - DNA, 20 bp, Homo sapiens
  source 1..20: mol_type = genomic DNA
tcatgtatcttttcactttg

SEQ ID NO: 166313 - DNA, 20 bp, Homo sapiens
  source 1..20: mol_type = genomic DNA
catgtatcttttcactttga

SEQ ID NO: 166314 - DNA, 20 bp, Homo sapiens
  source 1..20: mol_type = genomic DNA
atgtatcttttcactttgat

SEQ ID NO: 166315 - DNA, 20 bp, Homo sapiens
  source 1..20: mol_type = genomic DNA
tgtatcttttcactttgatt

SEQ ID NO: 166316 - DNA, 20 bp, Homo sapiens
  source 1..20: mol_type = genomic DNA
gtatcttttcactttgattg

SEQ ID NO: 166317 - DNA, 20 bp, Homo sapiens
  source 1..20: mol_type = genomic DNA
tatcttttcactttgattgt

SEQ ID NO: 166318 - DNA, 20 bp, Homo sapiens
  source 1..20: mol_type = genomic DNA
atcttttcactttgattgtt

SEQ ID NO: 166319 - DNA, 20 bp, Homo sapiens
  source 1..20: mol_type = genomic DNA
tcttttcactttgattgtta

SEQ ID NO: 166320 - DNA, 20 bp, Homo sapiens
  source 1..20: mol_type = genomic DNA
cttttcactttgattgttag

SEQ ID NO: 166321 - DNA, 20 bp, Homo sapiens
  source 1..20: mol_type = genomic DNA
ttttcactttgattgttagt

SEQ ID NO: 166322 - DNA, 20 bp, Homo sapiens
  source 1..20: mol_type = genomic DNA
tttcactttgattgttagtc

SEQ ID NO: 166323 - DNA, 20 bp, Homo sapiens
  source 1..20: mol_type = genomic DNA
ttcactttgattgttagtcg

SEQ ID NO: 166324 - DNA, 20 bp, Homo sapiens
  source 1..20: mol_type = genomic DNA
tcactttgattgttagtcgc

SEQ ID NO: 166325 - DNA, 20 bp, Homo sapiens
  source 1..20: mol_type = genomic DNA
cactttgattgttagtcgcg

SEQ ID NO: 166326 - DNA, 20 bp, Homo sapiens
  source 1..20: mol_type = genomic DNA
actttgattgttagtcgcgg

SEQ ID NO: 166327 - DNA, 20 bp, Homo sapiens
  source 1..20: mol_type = genomic DNA
ctttgattgttagtcgcggt

SEQ ID NO: 166328 - DNA, 20 bp, Homo sapiens
  source 1..20: mol_type = genomic DNA
tttgattgttagtcgcggtt

SEQ ID NO: 166329 - DNA, 20 bp, Homo sapiens
  source 1..20: mol_type = genomic DNA
ttgattgttagtcgcggttt

SEQ ID NO: 166330 - DNA, 20 bp, Homo sapiens
  source 1..20: mol_type = genomic DNA
tgattgttagtcgcggtttc

SEQ ID NO: 166331 - DNA, 20 bp, Homo sapiens
  source 1..20: mol_type = genomic DNA
gattgttagtcgcggtttct

SEQ ID NO: 166332 - DNA, 20 bp, Homo sapiens
  source 1..20: mol_type = genomic DNA
attgttagtcgcggtttcta

SEQ ID NO: 166333 - DNA, 20 bp, Homo sapiens
  source 1..20: mol_type = genomic DNA
ttgttagtcgcggtttctaa

SEQ ID NO: 166334 - DNA, 20 bp, Homo sapiens
  source 1..20: mol_type = genomic DNA
tgttagtcgcggtttctaaa

SEQ ID NO: 166335 - DNA, 20 bp, Homo sapiens
  source 1..20: mol_type = genomic DNA
gttagtcgcggtttctaaag

SEQ ID NO: 166336 - DNA, 20 bp, Homo sapiens
  source 1..20: mol_type = genomic DNA
ttagtcgcggtttctaaaga

SEQ ID NO: 166337 - DNA, 20 bp, Homo sapiens
  source 1..20: mol_type = genomic DNA
tagtcgcggtttctaaagat

SEQ ID NO: 166338 - DNA, 20 bp, Homo sapiens
  source 1..20: mol_type = genomic DNA
agtcgcggtttctaaagatc

SEQ ID NO: 166339 - DNA, 20 bp, Homo sapiens
  source 1..20: mol_type = genomic DNA
gtcgcggtttctaaagatcc

SEQ ID NO: 166340 - DNA, 20 bp, Homo sapiens
  source 1..20: mol_type = genomic DNA
tcgcggtttctaaagatcca

SEQ ID NO: 166341 - DNA, 20 bp, Homo sapiens
  source 1..20: mol_type = genomic DNA
cgcggtttctaaagatccag

SEQ ID NO: 166342 - DNA, 20 bp, Homo sapiens
  source 1..20: mol_type = genomic DNA
gcggtttctaaagatccaga

SEQ ID NO: 166343 - DNA, 20 bp, Homo sapiens
  source 1..20: mol_type = genomic DNA
cggtttctaaagatccagat

SEQ ID NO: 166344 - DNA, 20 bp, Homo sapiens
  source 1..20: mol_type = genomic DNA
ggtttctaaagatccagata

SEQ ID NO: 166345 - DNA, 20 bp, Homo sapiens
  source 1..20: mol_type = genomic DNA
gtttctaaagatccagataa

SEQ ID NO: 166346 - DNA, 20 bp, Homo sapiens
  source 1..20: mol_type = genomic DNA
tttctaaagatccagataaa

SEQ ID NO: 166347 - DNA, 20 bp, Homo sapiens
  source 1..20: mol_type = genomic DNA
ttctaaagatccagataaac

SEQ ID NO: 166348 - DNA, 20 bp, Homo sapiens
  source 1..20: mol_type = genomic DNA
tctaaagatccagataaact

SEQ ID NO: 166349 - DNA, 20 bp, Homo sapiens
  source 1..20: mol_type = genomic DNA
ctaaagatccagataaactg

SEQ ID NO: 166350 - DNA, 20 bp, Homo sapiens
  source 1..20: mol_type = genomic DNA
taaagatccagataaactgt

SEQ ID NO: 166351 - DNA, 20 bp, Homo sapiens
  source 1..20: mol_type = genomic DNA
aaagatccagataaactgta

SEQ ID NO: 166352 - DNA, 20 bp, Homo sapiens
  source 1..20: mol_type = genomic DNA
aagatccagataaactgtac

SEQ ID NO: 166353 - DNA, 20 bp, Homo sapiens
  source 1..20: mol_type = genomic DNA
agatccagataaactgtact

SEQ ID NO: 166354 - DNA, 20 bp, Homo sapiens
  source 1..20: mol_type = genomic DNA
gatccagataaactgtactt

SEQ ID NO: 166355 - DNA, 20 bp, Homo sapiens
  source 1..20: mol_type = genomic DNA
atccagataaactgtacttg

SEQ ID NO: 166356 - DNA, 20 bp, Homo sapiens
  source 1..20: mol_type = genomic DNA
tccagataaactgtacttgc

SEQ ID NO: 166357 - DNA, 20 bp, Homo sapiens
  source 1..20: mol_type = genomic DNA
ccagataaactgtacttgca

SEQ ID NO: 166358 - DNA, 20 bp, Homo sapiens
  source 1..20: mol_type = genomic DNA
cagataaactgtacttgcag

SEQ ID NO: 166359 - DNA, 20 bp, Homo sapiens
  source 1..20: mol_type = genomic DNA
agataaactgtacttgcagt

SEQ ID NO: 166360 - DNA, 20 bp, Homo sapiens
  source 1..20: mol_type = genomic DNA
gataaactgtacttgcagtt

SEQ ID NO: 166361 - DNA, 20 bp, Homo sapiens
  source 1..20: mol_type = genomic DNA
ataaactgtacttgcagttc

SEQ ID NO: 166362 - DNA, 20 bp, Homo sapiens
  source 1..20: mol_type = genomic DNA
taaactgtacttgcagttca

SEQ ID NO: 166363 - DNA, 20 bp, Homo sapiens
  source 1..20: mol_type = genomic DNA
aaactgtacttgcagttcaa

SEQ ID NO: 166364 - DNA, 20 bp, Homo sapiens
  source 1..20: mol_type = genomic DNA
aactgtacttgcagttcaaa

SEQ ID NO: 166365 - DNA, 20 bp, Homo sapiens
  source 1..20: mol_type = genomic DNA
actgtacttgcagttcaaat

SEQ ID NO: 166366 - DNA, 20 bp, Homo sapiens
  source 1..20: mol_type = genomic DNA
ctgtacttgcagttcaaatt

SEQ ID NO: 166367 - DNA, 20 bp, Homo sapiens
  source 1..20: mol_type = genomic DNA
tgtacttgcagttcaaatta

SEQ ID NO: 166368 - DNA, 20 bp, Homo sapiens
  source 1..20: mol_type = genomic DNA
gtacttgcagttcaaattag

SEQ ID NO: 166369 - DNA, 20 bp, Homo sapiens
  source 1..20: mol_type = genomic DNA
tacttgcagttcaaattagg

SEQ ID NO: 166370 - DNA, 20 bp, Homo sapiens
  source 1..20: mol_type = genomic DNA
acttgcagttcaaattagga

SEQ ID NO: 166371 - DNA, 20 bp, Homo sapiens
  source 1..20: mol_type = genomic DNA
cttgcagttcaaattaggaa

SEQ ID NO: 166372 - DNA, 20 bp, Homo sapiens
  source 1..20: mol_type = genomic DNA
ttgcagttcaaattaggaaa

SEQ ID NO: 166373 - DNA, 20 bp, Homo sapiens
  source 1..20: mol_type = genomic DNA
tgcagttcaaattaggaaaa

SEQ ID NO: 166374 - DNA, 20 bp, Homo sapiens
  source 1..20: mol_type = genomic DNA
gcagttcaaattaggaaaag

SEQ ID NO: 166375 - DNA, 20 bp, Homo sapiens
  source 1..20: mol_type = genomic DNA
cagttcaaattaggaaaagc

SEQ ID NO: 166376 - DNA, 20 bp, Homo sapiens
  source 1..20: mol_type = genomic DNA
agttcaaattaggaaaagca

SEQ ID NO: 166377 - DNA, 20 bp, Homo sapiens
  source 1..20: mol_type = genomic DNA
gttcaaattaggaaaagcaa

SEQ ID NO: 166378 - DNA, 20 bp, Homo sapiens
  source 1..20: mol_type = genomic DNA
ttcaaattaggaaaagcaat

SEQ ID NO: 166379 - DNA, 20 bp, Homo sapiens
  source 1..20: mol_type = genomic DNA
tcaaattaggaaaagcaatt

SEQ ID NO: 166380 - DNA, 20 bp, Homo sapiens
  source 1..20: mol_type = genomic DNA
caaattaggaaaagcaattt

SEQ ID NO: 166381 - DNA, 20 bp, Homo sapiens
  source 1..20: mol_type = genomic DNA
aaattaggaaaagcaatttt

SEQ ID NO: 166382 - DNA, 20 bp, Homo sapiens
  source 1..20: mol_type = genomic DNA
aattaggaaaagcaatttta

SEQ ID NO: 166383 - DNA, 20 bp, Homo sapiens
  source 1..20: mol_type = genomic DNA
attaggaaaagcaattttat

SEQ ID NO: 166384 - DNA, 20 bp, Homo sapiens
  source 1..20: mol_type = genomic DNA
ttaggaaaagcaattttatt

SEQ ID NO: 166385 - DNA, 20 bp, Homo sapiens
  source 1..20: mol_type = genomic DNA
taggaaaagcaattttattg

SEQ ID NO: 166386 - DNA, 20 bp, Homo sapiens
  source 1..20: mol_type = genomic DNA
aggaaaagcaattttattgg

SEQ ID NO: 166387 - DNA, 20 bp, Homo sapiens
  source 1..20: mol_type = genomic DNA
ggaaaagcaattttattgga

SEQ ID NO: 166388 - DNA, 20 bp, Homo sapiens
  source 1..20: mol_type = genomic DNA
gaaaagcaattttattggac

SEQ ID NO: 166389 - DNA, 20 bp, Homo sapiens
  source 1..20: mol_type = genomic DNA
aaaagcaattttattggaca

SEQ ID NO: 166390 - DNA, 20 bp, Homo sapiens
  source 1..20: mol_type = genomic DNA
aaagcaattttattggacaa

SEQ ID NO: 166391 - DNA, 20 bp, Homo sapiens
  source 1..20: mol_type = genomic DNA
aagcaattttattggacaat

SEQ ID NO: 166392 - DNA, 20 bp, Homo sapiens
  source 1..20: mol_type = genomic DNA
agcaattttattggacaatt

SEQ ID NO: 166393 - DNA, 20 bp, Homo sapiens
  source 1..20: mol_type = genomic DNA
gcaattttattggacaatta

SEQ ID NO: 166394 - DNA, 20 bp, Homo sapiens
  source 1..20: mol_type = genomic DNA
caattttattggacaattac

SEQ ID NO: 166395 - DNA, 20 bp, Homo sapiens
  source 1..20: mol_type = genomic DNA
aattttattggacaattacg

SEQ ID NO: 166396 - DNA, 20 bp, Homo sapiens
  source 1..20: mol_type = genomic DNA
attttattggacaattacgg

SEQ ID NO: 166397 - DNA, 20 bp, Homo sapiens
  source 1..20: mol_type = genomic DNA
ttttattggacaattacggt

SEQ ID NO: 166398 - DNA, 20 bp, Homo sapiens
  source 1..20: mol_type = genomic DNA
tttattggacaattacggtg

SEQ ID NO: 166399 - DNA, 20 bp, Homo sapiens
  source 1..20: mol_type = genomic DNA
ttattggacaattacggtga

SEQ ID NO: 166400 - DNA, 20 bp, Homo sapiens
  source 1..20: mol_type = genomic DNA
tattggacaattacggtgaa

SEQ ID NO: 166401 - DNA, 20 bp, Homo sapiens
  source 1..20: mol_type = genomic DNA
attggacaattacggtgaaa

SEQ ID NO: 166402 - DNA, 20 bp, Homo sapiens
  source 1..20: mol_type = genomic DNA
ttggacaattacggtgaaaa

SEQ ID NO: 166403 - DNA, 20 bp, Homo sapiens
  source 1..20: mol_type = genomic DNA
tggacaattacggtgaaaat

SEQ ID NO: 166404 - DNA, 20 bp, Homo sapiens
  source 1..20: mol_type = genomic DNA
ggacaattacggtgaaaatg

SEQ ID NO: 166405 - DNA, 20 bp, Homo sapiens
  source 1..20: mol_type = genomic DNA
gacaattacggtgaaaatga

SEQ ID NO: 166406 - DNA, 20 bp, Homo sapiens
  source 1..20: mol_type = genomic DNA
acaattacggtgaaaatgaa

SEQ ID NO: 166407 - DNA, 20 bp, Homo sapiens
  source 1..20: mol_type = genomic DNA
caattacggtgaaaatgaat

SEQ ID NO: 166408 - DNA, 20 bp, Homo sapiens
  source 1..20: mol_type = genomic DNA
aattacggtgaaaatgaatt

SEQ ID NO: 166409 - DNA, 20 bp, Homo sapiens
  source 1..20: mol_type = genomic DNA
attacggtgaaaatgaatta

SEQ ID NO: 166410 - DNA, 20 bp, Homo sapiens
  source 1..20: mol_type = genomic DNA
ttacggtgaaaatgaattat

SEQ ID NO: 166411 - DNA, 20 bp, Homo sapiens
  source 1..20: mol_type = genomic DNA
tacggtgaaaatgaattatt

SEQ ID NO: 166412 - DNA, 20 bp, Homo sapiens
  source 1..20: mol_type = genomic DNA
acggtgaaaatgaattattt

SEQ ID NO: 166413 - DNA, 20 bp, Homo sapiens
  source 1..20: mol_type = genomic DNA
cggtgaaaatgaattatttt

SEQ ID NO: 166414 - DNA, 20 bp, Homo sapiens
  source 1..20: mol_type = genomic DNA
ggtgaaaatgaattatttta

SEQ ID NO: 166415 - DNA, 20 bp, Homo sapiens
  source 1..20: mol_type = genomic DNA
gtgaaaatgaattattttat

SEQ ID NO: 166416 - DNA, 20 bp, Homo sapiens
  source 1..20: mol_type = genomic DNA
tgaaaatgaattattttatc

SEQ ID NO: 166417 - DNA, 20 bp, Homo sapiens
  source 1..20: mol_type = genomic DNA
gaaaatgaattattttatct

SEQ ID NO: 166418 - DNA, 20 bp, Homo sapiens
  source 1..20: mol_type = genomic DNA
aaaatgaattattttatcta

SEQ ID NO: 166419 - DNA, 20 bp, Homo sapiens
  source 1..20: mol_type = genomic DNA
aaatgaattattttatctag

SEQ ID NO: 166420 - DNA, 20 bp, Homo sapiens
  source 1..20: mol_type = genomic DNA
aatgaattattttatctagg

SEQ ID NO: 166421 - DNA, 20 bp, Homo sapiens
  source 1..20: mol_type = genomic DNA
atgaattattttatctaggt

SEQ ID NO: 166422 - DNA, 20 bp, Homo sapiens
  source 1..20: mol_type = genomic DNA
tgaattattttatctaggtc

SEQ ID NO: 166423 - DNA, 20 bp, Homo sapiens
  source 1..20: mol_type = genomic DNA
gaattattttatctaggtca

SEQ ID NO: 166424 - DNA, 20 bp, Homo sapiens
  source 1..20: mol_type = genomic DNA
aattattttatctaggtcag

SEQ ID NO: 166425 - DNA, 20 bp, Homo sapiens
  source 1..20: mol_type = genomic DNA
attattttatctaggtcagt

SEQ ID NO: 166426 - DNA, 20 bp, Homo sapiens
  source 1..20: mol_type = genomic DNA
ttattttatctaggtcagtt

SEQ ID NO: 166427 - DNA, 20 bp, Homo sapiens
  source 1..20: mol_type = genomic DNA
tattttatctaggtcagtta

SEQ ID NO: 166428 - DNA, 20 bp, Homo sapiens
  source 1..20: mol_type = genomic DNA
attttatctaggtcagttaa

SEQ ID NO: 166429 - DNA, 20 bp, Homo sapiens
  source 1..20: mol_type = genomic DNA
ttttatctaggtcagttaag

SEQ ID NO: 166430 - DNA, 20 bp, Homo sapiens
  source 1..20: mol_type = genomic DNA
tttatctaggtcagttaaga

SEQ ID NO: 166431 - DNA, 20 bp, Homo sapiens
  source 1..20: mol_type = genomic DNA
ttatctaggtcagttaagaa

SEQ ID NO: 166432 - DNA, 20 bp, Homo sapiens
  source 1..20: mol_type = genomic DNA
tatctaggtcagttaagaac

SEQ ID NO: 166433 - DNA, 20 bp, Homo sapiens
  source 1..20: mol_type = genomic DNA
atctaggtcagttaagaaca

SEQ ID NO: 166434 - DNA, 20 bp, Homo sapiens
  source 1..20: mol_type = genomic DNA
tctaggtcagttaagaacac

SEQ ID NO: 166435 - DNA, 20 bp, Homo sapiens
  source 1..20: mol_type = genomic DNA
ctaggtcagttaagaacact

SEQ ID NO: 166436 - DNA, 20 bp, Homo sapiens
  source 1..20: mol_type = genomic DNA
taggtcagttaagaacactg

SEQ ID NO: 166437 - DNA, 20 bp, Homo sapiens
  source 1..20: mol_type = genomic DNA
aggtcagttaagaacactgt

SEQ ID NO: 166438 - DNA, 20 bp, Homo sapiens
  source 1..20: mol_type = genomic DNA
ggtcagttaagaacactgtt

SEQ ID NO: 166439 - DNA, 20 bp, Homo sapiens
  source 1..20: mol_type = genomic DNA
gtcagttaagaacactgttc

SEQ ID NO: 166440 - DNA, 20 bp, Homo sapiens
  source 1..20: mol_type = genomic DNA
tcagttaagaacactgttct

SEQ ID NO: 166441 - DNA, 20 bp, Homo sapiens
  source 1..20: mol_type = genomic DNA
cagttaagaacactgttctg

SEQ ID NO: 166442 - DNA, 20 bp, Homo sapiens
  source 1..20: mol_type = genomic DNA
agttaagaacactgttctgc

SEQ ID NO: 166443 - DNA, 20 bp, Homo sapiens
  source 1..20: mol_type = genomic DNA
gttaagaacactgttctgct

SEQ ID NO: 166444 - DNA, 20 bp, Homo sapiens
  source 1..20: mol_type = genomic DNA
ttaagaacactgttctgcta

SEQ ID NO: 166445 - DNA, 20 bp, Homo sapiens
  source 1..20: mol_type = genomic DNA
taagaacactgttctgctaa

SEQ ID NO: 166446 - DNA, 20 bp, Homo sapiens
  source 1..20: mol_type = genomic DNA
aagaacactgttctgctaag

SEQ ID NO: 166447 - DNA, 20 bp, Homo sapiens
  source 1..20: mol_type = genomic DNA
agaacactgttctgctaaga

SEQ ID NO: 166448 - DNA, 20 bp, Homo sapiens
  source 1..20: mol_type = genomic DNA
gaacactgttctgctaagat

SEQ ID NO: 166449 - DNA, 20 bp, Homo sapiens
  source 1..20: mol_type = genomic DNA
aacactgttctgctaagatg

SEQ ID NO: 166450 - DNA, 20 bp, Homo sapiens
  source 1..20: mol_type = genomic DNA
acactgttctgctaagatgc

SEQ ID NO: 166451 - DNA, 20 bp, Homo sapiens
  source 1..20: mol_type = genomic DNA
cactgttctgctaagatgca

SEQ ID NO: 166452 - DNA, 20 bp, Homo sapiens
  source 1..20: mol_type = genomic DNA
actgttctgctaagatgcag

SEQ ID NO: 166453 - DNA, 20 bp, Homo sapiens
  source 1..20: mol_type = genomic DNA
ctgttctgctaagatgcagt

SEQ ID NO: 166454 - DNA, 20 bp, Homo sapiens
  source 1..20: mol_type = genomic DNA
tgttctgctaagatgcagta

SEQ ID NO: 166455 - DNA, 20 bp, Homo sapiens
  source 1..20: mol_type = genomic DNA
gttctgctaagatgcagtaa

SEQ ID NO: 166456 - DNA, 20 bp, Homo sapiens
  source 1..20: mol_type = genomic DNA
ttctgctaagatgcagtaaa

SEQ ID NO: 166457 - DNA, 20 bp, Homo sapiens
  source 1..20: mol_type = genomic DNA
tctgctaagatgcagtaaaa

SEQ ID NO: 166458 - DNA, 20 bp, Homo sapiens
  source 1..20: mol_type = genomic DNA
ctgctaagatgcagtaaaaa

SEQ ID NO: 166459 - DNA, 20 bp, Homo sapiens
  source 1..20: mol_type = genomic DNA
tgctaagatgcagtaaaaag

SEQ ID NO: 166460 - DNA, 20 bp, Homo sapiens
  source 1..20: mol_type = genomic DNA
gctaagatgcagtaaaaagc

SEQ ID NO: 166461 - DNA, 20 bp, Homo sapiens
  source 1..20: mol_type = genomic DNA
ctaagatgcagtaaaaagca

SEQ ID NO: 166462 - DNA, 20 bp, Homo sapiens
  source 1..20: mol_type = genomic DNA
taagatgcagtaaaaagcag

SEQ ID NO: 166463 - DNA, 20 bp, Homo sapiens
  source 1..20: mol_type = genomic DNA
aagatgcagtaaaaagcagg

SEQ ID NO: 166464 - DNA, 20 bp, Homo sapiens
  source 1..20: mol_type = genomic DNA
agatgcagtaaaaagcaggt

SEQ ID NO: 166465 - DNA, 20 bp, Homo sapiens
  source 1..20: mol_type = genomic DNA
gatgcagtaaaaagcaggtt

SEQ ID NO: 166466 - DNA, 20 bp, Homo sapiens
  source 1..20: mol_type = genomic DNA
atgcagtaaaaagcaggtta

SEQ ID NO: 166467 - DNA, 20 bp, Homo sapiens
  source 1..20: mol_type = genomic DNA
tgcagtaaaaagcaggttac

SEQ ID NO: 166468 - DNA, 20 bp, Homo sapiens
  source 1..20: mol_type = genomic DNA
gcagtaaaaagcaggttaca

SEQ ID NO: 166469 - DNA, 20 bp, Homo sapiens
  source 1..20: mol_type = genomic DNA
cagtaaaaagcaggttacat

SEQ ID NO: 166470 - DNA, 20 bp, Homo sapiens
  source 1..20: mol_type = genomic DNA
agtaaaaagcaggttacatt

SEQ ID NO: 166471 - DNA, 20 bp, Homo sapiens
  source 1..20: mol_type = genomic DNA
gtaaaaagcaggttacattt

SEQ ID NO: 166472 - DNA, 20 bp, Homo sapiens
  source 1..20: mol_type = genomic DNA
taaaaagcaggttacatttg

SEQ ID NO: 166473 - DNA, 20 bp, Homo sapiens
  source 1..20: mol_type = genomic DNA
aaaaagcaggttacatttga

SEQ ID NO: 166474 - DNA, 20 bp, Homo sapiens
  source 1..20: mol_type = genomic DNA
aaaagcaggttacatttgac

SEQ ID NO: 166475 - DNA, 20 bp, Homo sapiens
  source 1..20: mol_type = genomic DNA
aaagcaggttacatttgacc

SEQ ID NO: 166476 - DNA, 20 bp, Homo sapiens
  source 1..20: mol_type = genomic DNA
aagcaggttacatttgacca

SEQ ID NO: 166477 - DNA, 20 bp, Homo sapiens
  source 1..20: mol_type = genomic DNA
agcaggttacatttgaccat

SEQ ID NO: 166478 - DNA, 20 bp, Homo sapiens
  source 1..20: mol_type = genomic DNA
gcaggttacatttgaccata

SEQ ID NO: 166479 - DNA, 20 bp, Homo sapiens
  source 1..20: mol_type = genomic DNA
caggttacatttgaccatat

SEQ ID NO: 166480 - DNA, 20 bp, Homo sapiens
  source 1..20: mol_type = genomic DNA
aggttacatttgaccatatt

SEQ ID NO: 166481 - DNA, 20 bp, Homo sapiens
  source 1..20: mol_type = genomic DNA
ggttacatttgaccatatta

SEQ ID NO: 166482 - DNA, 20 bp, Homo sapiens
  source 1..20: mol_type = genomic DNA
gttacatttgaccatattag

SEQ ID NO: 166483 - DNA, 20 bp, Homo sapiens
  source 1..20: mol_type = genomic DNA
ttacatttgaccatattaga

SEQ ID NO: 166484 - DNA, 20 bp, Homo sapiens
  source 1..20: mol_type = genomic DNA
tacatttgaccatattagat

SEQ ID NO: 166485 - DNA, 20 bp, Homo sapiens
  source 1..20: mol_type = genomic DNA
acatttgaccatattagatc

SEQ ID NO: 166486 - DNA, 20 bp, Homo sapiens
  source 1..20: mol_type = genomic DNA
catttgaccatattagatct

SEQ ID NO: 166487 - DNA, 20 bp, Homo sapiens
  source 1..20: mol_type = genomic DNA
atttgaccatattagatctg

SEQ ID NO: 166488 - DNA, 20 bp, Homo sapiens
  source 1..20: mol_type = genomic DNA
tttgaccatattagatctga

SEQ ID NO: 166489 - DNA, 20 bp, Homo sapiens
  source 1..20: mol_type = genomic DNA
ttgaccatattagatctgag

SEQ ID NO: 166490 - DNA, 20 bp, Homo sapiens
  source 1..20: mol_type = genomic DNA
tgaccatattagatctgagt

SEQ ID NO: 166491 - DNA, 20 bp, Homo sapiens
  source 1..20: mol_type = genomic DNA
gaccatattagatctgagtt

SEQ ID NO: 166492 - DNA, 20 bp, Homo sapiens
  source 1..20: mol_type = genomic DNA
accatattagatctgagttt

SEQ ID NO: 166493 - DNA, 20 bp, Homo sapiens
  source 1..20: mol_type = genomic DNA
ccatattagatctgagtttg

SEQ ID NO: 166494 - DNA, 20 bp, Homo sapiens
  source 1..20: mol_type = genomic DNA
catattagatctgagtttgg

SEQ ID NO: 166495 - DNA, 20 bp, Homo sapiens
  source 1..20: mol_type = genomic DNA
atattagatctgagtttgga

SEQ ID NO: 166496 - DNA, 20 bp, Homo sapiens
  source 1..20: mol_type = genomic DNA
tattagatctgagtttggaa

SEQ ID NO: 166497 - DNA, 20 bp, Homo sapiens
  source 1..20: mol_type = genomic DNA
attagatctgagtttggaaa

SEQ ID NO: 166498 - DNA, 20 bp, Homo sapiens
  source 1..20: mol_type = genomic DNA
ttagatctgagtttggaaaa

SEQ ID NO: 166499 - DNA, 20 bp, Homo sapiens
  source 1..20: mol_type = genomic DNA
tagatctgagtttggaaaac

SEQ ID NO: 166500 - DNA, 20 bp, Homo sapiens
  source 1..20: mol_type = genomic DNA
agatctgagtttggaaaaca

SEQ ID NO: 166501 - DNA, 20 bp, Homo sapiens
  source 1..20: mol_type = genomic DNA
gatctgagtttggaaaacag

SEQ ID NO: 166502 - DNA, 20 bp, Homo sapiens
  source 1..20: mol_type = genomic DNA
atctgagtttggaaaacaga

SEQ ID NO: 166503 - DNA, 20 bp, Homo sapiens
  source 1..20: mol_type = genomic DNA
tctgagtttggaaaacagaa

SEQ ID NO: 166504 - DNA, 20 bp, Homo sapiens
  source 1..20: mol_type = genomic DNA
ctgagtttggaaaacagaag

SEQ ID NO: 166505 - DNA, 20 bp, Homo sapiens
  source 1..20: mol_type = genomic DNA
tgagtttggaaaacagaagt

SEQ ID NO: 166506 - DNA, 20 bp, Homo sapiens
  source 1..20: mol_type = genomic DNA
gagtttggaaaacagaagta

SEQ ID NO: 166507 - DNA, 20 bp, Homo sapiens
  source 1..20: mol_type = genomic DNA
agtttggaaaacagaagtag

SEQ ID NO: 166508 - DNA, 20 bp, Homo sapiens
  source 1..20: mol_type = genomic DNA
gtttggaaaacagaagtagt

SEQ ID NO: 166509 - DNA, 20 bp, Homo sapiens
  source 1..20: mol_type = genomic DNA
tttggaaaacagaagtagtc

SEQ ID NO: 166510 - DNA, 20 bp, Homo sapiens
  source 1..20: mol_type = genomic DNA
ttggaaaacagaagtagtct

SEQ ID NO: 166511 - DNA, 20 bp, Homo sapiens
  source 1..20: mol_type = genomic DNA
tggaaaacagaagtagtctt

SEQ ID NO: 166512 - DNA, 20 bp, Homo sapiens
  source 1..20: mol_type = genomic DNA
ggaaaacagaagtagtcttt

SEQ ID NO: 166513 - DNA, 20 bp, Homo sapiens
  source 1..20: mol_type = genomic DNA
gaaaacagaagtagtcttta

SEQ ID NO: 166514 - DNA, 20 bp, Homo sapiens
  source 1..20: mol_type = genomic DNA
aaaacagaagtagtctttag

SEQ ID NO: 166515 - DNA, 20 bp, Homo sapiens
  source 1..20: mol_type = genomic DNA
aaacagaagtagtctttagt

SEQ ID NO: 166516 - DNA, 20 bp, Homo sapiens
  source 1..20: mol_type = genomic DNA
aacagaagtagtctttagtt

SEQ ID NO: 166517 - DNA, 20 bp, Homo sapiens
  source 1..20: mol_type = genomic DNA
acagaagtagtctttagttt

SEQ ID NO: 166518 - DNA, 20 bp, Homo sapiens
  source 1..20: mol_type = genomic DNA
cagaagtagtctttagtttt

SEQ ID NO: 166519 - DNA, 20 bp, Homo sapiens
  source 1..20: mol_type = genomic DNA
agaagtagtctttagtttta

SEQ ID NO: 166520 - DNA, 20 bp, Homo sapiens
  source 1..20: mol_type = genomic DNA
gaagtagtctttagttttaa

SEQ ID NO: 166521 - DNA, 20 bp, Homo sapiens
  source 1..20: mol_type = genomic DNA
aagtagtctttagttttaaa

SEQ ID NO: 166522 - DNA, 20 bp, Homo sapiens
  source 1..20: mol_type = genomic DNA
agtagtctttagttttaaaa

SEQ ID NO: 166523 - DNA, 20 bp, Homo sapiens
  source 1..20: mol_type = genomic DNA
gtagtctttagttttaaaat

SEQ ID NO: 166524 - DNA, 20 bp, Homo sapiens
  source 1..20: mol_type = genomic DNA
tagtctttagttttaaaatg

SEQ ID NO: 166525 - DNA, 20 bp, Homo sapiens
  source 1..20: mol_type = genomic DNA
agtctttagttttaaaatgg

SEQ ID NO: 166526 - DNA, 20 bp, Homo sapiens
  source 1..20: mol_type = genomic DNA
gtctttagttttaaaatggc

SEQ ID NO: 166527 - DNA, 20 bp, Homo sapiens
  source 1..20: mol_type = genomic DNA
tctttagttttaaaatggcc

SEQ ID NO: 166528 - DNA, 20 bp, Homo sapiens
  source 1..20: mol_type = genomic DNA
ctttagttttaaaatggcca

SEQ ID NO: 166529 - DNA, 20 bp, Homo sapiens
  source 1..20: mol_type = genomic DNA
tttagttttaaaatggccag

SEQ ID NO: 166530 - DNA, 20 bp, Homo sapiens
  source 1..20: mol_type = genomic DNA
ttagttttaaaatggccaga

SEQ ID NO: 166531 - DNA, 20 bp, Homo sapiens
  source 1..20: mol_type = genomic DNA
tagttttaaaatggccagat

SEQ ID NO: 166532 - DNA, 20 bp, Homo sapiens
  source 1..20: mol_type = genomic DNA
agttttaaaatggccagatt

SEQ ID NO: 166533 - DNA, 20 bp, Homo sapiens
  source 1..20: mol_type = genomic DNA
gttttaaaatggccagattt

SEQ ID NO: 166534 - DNA, 20 bp, Homo sapiens
  source 1..20: mol_type = genomic DNA
ttttaaaatggccagatttt

SEQ ID NO: 166535 - DNA, 20 bp, Homo sapiens
  source 1..20: mol_type = genomic DNA
tttaaaatggccagattttc

SEQ ID NO: 166536 - DNA, 20 bp, Homo sapiens
  source 1..20: mol_type = genomic DNA
ttaaaatggccagattttct

SEQ ID NO: 166537 - DNA, 20 bp, Homo sapiens
  source 1..20: mol_type = genomic DNA
taaaatggccagattttctt

SEQ ID NO: 166538 - DNA, 20 bp, Homo sapiens
  source 1..20: mol_type = genomic DNA
aaaatggccagattttcttg

SEQ ID NO: 166539 - DNA, 20 bp, Homo sapiens
  source 1..20: mol_type = genomic DNA
aaatggccagattttcttgc

SEQ ID NO: 166540 - DNA, 20 bp, Homo sapiens
  source 1..20: mol_type = genomic DNA
aatggccagattttcttgcc

SEQ ID NO: 166541 - DNA, 20 bp, Homo sapiens
  source 1..20: mol_type = genomic DNA
atggccagattttcttgcca

SEQ ID NO: 166542 - DNA, 20 bp, Homo sapiens
  source 1..20: mol_type = genomic DNA
tggccagattttcttgccag

SEQ ID NO: 166543 - DNA, 20 bp, Homo sapiens
  source 1..20: mol_type = genomic DNA
ggccagattttcttgccagg

SEQ ID NO: 166544 - DNA, 20 bp, Homo sapiens
  source 1..20: mol_type = genomic DNA
gccagattttcttgccagga

SEQ ID NO: 166545 - DNA, 20 bp, Homo sapiens
  source 1..20: mol_type = genomic DNA
ccagattttcttgccaggat

SEQ ID NO: 166546 - DNA, 20 bp, Homo sapiens
  source 1..20: mol_type = genomic DNA
cagattttcttgccaggatt

SEQ ID NO: 166547 - DNA, 20 bp, Homo sapiens
  source 1..20: mol_type = genomic DNA
agattttcttgccaggattg

SEQ ID NO: 166548 - DNA, 20 bp, Homo sapiens
  source 1..20: mol_type = genomic DNA
gattttcttgccaggattgg

SEQ ID NO: 166549 - DNA, 20 bp, Homo sapiens
  source 1..20: mol_type = genomic DNA
attttcttgccaggattggg

SEQ ID NO: 166550 - DNA, 20 bp, Homo sapiens
  source 1..20: mol_type = genomic DNA
ttttcttgccaggattgggt

SEQ ID NO: 166551 - DNA, 20 bp, Homo sapiens
  source 1..20: mol_type = genomic DNA
tttcttgccaggattgggtt

SEQ ID NO: 166552 - DNA, 20 bp, Homo sapiens
  source 1..20: mol_type = genomic DNA
ttcttgccaggattgggttt

SEQ ID NO: 166553 - DNA, 20 bp, Homo sapiens
  source 1..20: mol_type = genomic DNA
tcttgccaggattgggtttc

SEQ ID NO: 166554 - DNA, 20 bp, Homo sapiens
  source 1..20: mol_type = genomic DNA
cttgccaggattgggtttct

SEQ ID NO: 166555 - DNA, 20 bp, Homo sapiens
  source 1..20: mol_type = genomic DNA
ttgccaggattgggtttctc

SEQ ID NO: 166556 - DNA, 20 bp, Homo sapiens
  source 1..20: mol_type = genomic DNA
tgccaggattgggtttctca

SEQ ID NO: 166557 - DNA, 20 bp, Homo sapiens
  source 1..20: mol_type = genomic DNA
gccaggattgggtttctcac

SEQ ID NO: 166558 - DNA, 20 bp, Homo sapiens
  source 1..20: mol_type = genomic DNA
ccaggattgggtttctcact

SEQ ID NO: 166559 - DNA, 20 bp, Homo sapiens
  source 1..20: mol_type = genomic DNA
caggattgggtttctcactt

SEQ ID NO: 166560 - DNA, 20 bp, Homo sapiens
  source 1..20: mol_type = genomic DNA
aggattgggtttctcacttg

SEQ ID NO: 166561 - DNA, 20 bp, Homo sapiens
  source 1..20: mol_type = genomic DNA
ggattgggtttctcacttgt

SEQ ID NO: 166562 - DNA, 20 bp, Homo sapiens
  source 1..20: mol_type = genomic DNA
gattgggtttctcacttgtt

SEQ ID NO: 166563 - DNA, 20 bp, Homo sapiens
  source 1..20: mol_type = genomic DNA
attgggtttctcacttgtta

SEQ ID NO: 166564 - DNA, 20 bp, Homo sapiens
  source 1..20: mol_type = genomic DNA
ttgggtttctcacttgttaa

SEQ ID NO: 166565 - DNA, 20 bp, Homo sapiens
  source 1..20: mol_type = genomic DNA
tgggtttctcacttgttaaa

SEQ ID NO: 166566 - DNA, 20 bp, Homo sapiens
  source 1..20: mol_type = genomic DNA
gggtttctcacttgttaaac

SEQ ID NO: 166567 - DNA, 20 bp, Homo sapiens
  source 1..20: mol_type = genomic DNA
ggtttctcacttgttaaaca

SEQ ID NO: 166568 - DNA, 20 bp, Homo sapiens
  source 1..20: mol_type = genomic DNA
gtttctcacttgttaaacag

SEQ ID NO: 166569 - DNA, 20 bp, Homo sapiens
  source 1..20: mol_type = genomic DNA
tttctcacttgttaaacaga

SEQ ID NO: 166570 - DNA, 20 bp, Homo sapiens
  source 1..20: mol_type = genomic DNA
ttctcacttgttaaacagaa

SEQ ID NO: 166571 - DNA, 20 bp, Homo sapiens
  source 1..20: mol_type = genomic DNA
tctcacttgttaaacagaac

SEQ ID NO: 166572 - DNA, 20 bp, Homo sapiens
  source 1..20: mol_type = genomic DNA
ctcacttgttaaacagaaca

SEQ ID NO: 166573 - DNA, 20 bp, Homo sapiens
  source 1..20: mol_type = genomic DNA
tcacttgttaaacagaacat

SEQ ID NO: 166574 - DNA, 20 bp, Homo sapiens
  source 1..20: mol_type = genomic DNA
cacttgttaaacagaacatt

SEQ ID NO: 166575 - DNA, 20 bp, Homo sapiens
  source 1..20: mol_type = genomic DNA
acttgttaaacagaacattt

SEQ ID NO: 166576 - DNA, 20 bp, Homo sapiens
  source 1..20: mol_type = genomic DNA
cttgttaaacagaacatttt

SEQ ID NO: 166577 - DNA, 20 bp, Homo sapiens
  source 1..20: mol_type = genomic DNA
ttgttaaacagaacattttg

SEQ ID NO: 166578 - DNA, 20 bp, Homo sapiens
  source 1..20: mol_type = genomic DNA
tgttaaacagaacattttgt

SEQ ID NO: 166579 - DNA, 20 bp, Homo sapiens
  source 1..20: mol_type = genomic DNA
gttaaacagaacattttgtt

SEQ ID NO: 166580 - DNA, 20 bp, Homo sapiens
  source 1..20: mol_type = genomic DNA
ttaaacagaacattttgtta

SEQ ID NO: 166581 - DNA, 20 bp, Homo sapiens
  source 1..20: mol_type = genomic DNA
taaacagaacattttgttaa

SEQ ID NO: 166582 - DNA, 20 bp, Homo sapiens
  source 1..20: mol_type = genomic DNA
aaacagaacattttgttaag

SEQ ID NO: 166583 - DNA, 20 bp, Homo sapiens
  source 1..20: mol_type = genomic DNA
aacagaacattttgttaagt

SEQ ID NO: 166584 - DNA, 20 bp, Homo sapiens
  source 1..20: mol_type = genomic DNA
acagaacattttgttaagtt

SEQ ID NO: 166585 - DNA, 20 bp, Homo sapiens
  source 1..20: mol_type = genomic DNA
cagaacattttgttaagttt

SEQ ID NO: 166586 - DNA, 20 bp, Homo sapiens
  source 1..20: mol_type = genomic DNA
agaacattttgttaagttta

SEQ ID NO: 166587 - DNA, 20 bp, Homo sapiens
  source 1..20: mol_type = genomic DNA
gaacattttgttaagtttaa

SEQ ID NO: 166588 - DNA, 20 bp, Homo sapiens
  source 1..20: mol_type = genomic DNA
aacattttgttaagtttaaa

SEQ ID NO: 166589 - DNA, 20 bp, Homo sapiens
  source 1..20: mol_type = genomic DNA
acattttgttaagtttaaaa

SEQ ID NO: 166590 - DNA, 20 bp, Homo sapiens
  source 1..20: mol_type = genomic DNA
cattttgttaagtttaaaac

SEQ ID NO: 166591 - DNA, 20 bp, Homo sapiens
  source 1..20: mol_type = genomic DNA
attttgttaagtttaaaacc

SEQ ID NO: 166592 - DNA, 20 bp, Homo sapiens
  source 1..20: mol_type = genomic DNA
ttttgttaagtttaaaacct

SEQ ID NO: 166593 - DNA, 20 bp, Homo sapiens
  source 1..20: mol_type = genomic DNA
tttgttaagtttaaaacctg

SEQ ID NO: 166594 - DNA, 20 bp, Homo sapiens
  source 1..20: mol_type = genomic DNA
ttgttaagtttaaaacctgg

SEQ ID NO: 166595 - DNA, 20 bp, Homo sapiens
  source 1..20: mol_type = genomic DNA
tgttaagtttaaaacctggg

SEQ ID NO: 166596 - DNA, 20 bp, Homo sapiens
  source 1..20: mol_type = genomic DNA
gttaagtttaaaacctggga

SEQ ID NO: 166597 - DNA, 20 bp, Homo sapiens
  source 1..20: mol_type = genomic DNA
ttaagtttaaaacctgggat

SEQ ID NO: 166598 - DNA, 20 bp, Homo sapiens
  source 1..20: mol_type = genomic DNA
taagtttaaaacctgggatg

SEQ ID NO: 166599 - DNA, 20 bp, Homo sapiens
  source 1..20: mol_type = genomic DNA
aagtttaaaacctgggatgg

SEQ ID NO: 166600 - DNA, 20 bp, Homo sapiens
  source 1..20: mol_type = genomic DNA
agtttaaaacctgggatgga

SEQ ID NO: 166601 - DNA, 20 bp, Homo sapiens
  source 1..20: mol_type = genomic DNA
gtttaaaacctgggatggac

SEQ ID NO: 166602 - DNA, 20 bp, Homo sapiens
  source 1..20: mol_type = genomic DNA
tttaaaacctgggatggact

SEQ ID NO: 166603 - DNA, 20 bp, Homo sapiens
  source 1..20: mol_type = genomic DNA
ttaaaacctgggatggactt

SEQ ID NO: 166604 - DNA, 20 bp, Homo sapiens
  source 1..20: mol_type = genomic DNA
taaaacctgggatggactta

SEQ ID NO: 166605 - DNA, 20 bp, Homo sapiens
  source 1..20: mol_type = genomic DNA
aaaacctgggatggacttaa

SEQ ID NO: 166606 - DNA, 20 bp, Homo sapiens
  source 1..20: mol_type = genomic DNA
aaacctgggatggacttaag

SEQ ID NO: 166607 - DNA, 20 bp, Homo sapiens
  source 1..20: mol_type = genomic DNA
aacctgggatggacttaagt

SEQ ID NO: 166608 - DNA, 20 bp, Homo sapiens
  source 1..20: mol_type = genomic DNA
acctgggatggacttaagta

SEQ ID NO: 166609 - DNA, 20 bp, Homo sapiens
  source 1..20: mol_type = genomic DNA
cctgggatggacttaagtat

SEQ ID NO: 166610 - DNA, 20 bp, Homo sapiens
  source 1..20: mol_type = genomic DNA
ctgggatggacttaagtatt

SEQ ID NO: 166611 - DNA, 20 bp, Homo sapiens
  source 1..20: mol_type = genomic DNA
tgggatggacttaagtattc

SEQ ID NO: 166612 - DNA, 20 bp, Homo sapiens
  source 1..20: mol_type = genomic DNA
gggatggacttaagtattca

SEQ ID NO: 166613 - DNA, 20 bp, Homo sapiens
  source 1..20: mol_type = genomic DNA
ggatggacttaagtattcat

SEQ ID NO: 166614 - DNA, 20 bp, Homo sapiens
  source 1..20: mol_type = genomic DNA
gatggacttaagtattcatg

SEQ ID NO: 166615 - DNA, 20 bp, Homo sapiens
  source 1..20: mol_type = genomic DNA
atggacttaagtattcatgt

SEQ ID NO: 166616 - DNA, 20 bp, Homo sapiens
  source 1..20: mol_type = genomic DNA
tggacttaagtattcatgtt

SEQ ID NO: 166617 - DNA, 20 bp, Homo sapiens
  source 1..20: mol_type = genomic DNA
ggacttaagtattcatgttc

SEQ ID NO: 166618 - DNA, 20 bp, Homo sapiens
  source 1..20: mol_type = genomic DNA
gacttaagtattcatgttca

SEQ ID NO: 166619 - DNA, 20 bp, Homo sapiens
  source 1..20: mol_type = genomic DNA
acttaagtattcatgttcat

SEQ ID NO: 166620 - DNA, 20 bp, Homo sapiens
  source 1..20: mol_type = genomic DNA
cttaagtattcatgttcatt

SEQ ID NO: 166621 - DNA, 20 bp, Homo sapiens
  source 1..20: mol_type = genomic DNA
ttaagtattcatgttcattc

SEQ ID NO: 166622 - DNA, 20 bp, Homo sapiens
  source 1..20: mol_type = genomic DNA
taagtattcatgttcattca

SEQ ID NO: 166623 - DNA, 20 bp, Homo sapiens
  source 1..20: mol_type = genomic DNA
aagtattcatgttcattcat

SEQ ID NO: 166624 - DNA, 20 bp, Homo sapiens
  source 1..20: mol_type = genomic DNA
agtattcatgttcattcatg

SEQ ID NO: 166625 - DNA, 20 bp, Homo sapiens
  source 1..20: mol_type = genomic DNA
gtattcatgttcattcatgt

SEQ ID NO: 166626 - DNA, 20 bp, Homo sapiens
  source 1..20: mol_type = genomic DNA
tattcatgttcattcatgtt

SEQ ID NO: 166627 - DNA, 20 bp, Homo sapiens
  source 1..20: mol_type = genomic DNA
attcatgttcattcatgttc

SEQ ID NO: 166628 - DNA, 20 bp, Homo sapiens
  source 1..20: mol_type = genomic DNA
ttcatgttcattcatgttca

SEQ ID NO: 166629 - DNA, 20 bp, Homo sapiens
  source 1..20: mol_type = genomic DNA
tcatgttcattcatgttcat

SEQ ID NO: 166630 - DNA, 20 bp, Homo sapiens
  source 1..20: mol_type = genomic DNA
catgttcattcatgttcatt

SEQ ID NO: 166631 - DNA, 20 bp, Homo sapiens
  source 1..20: mol_type = genomic DNA
atgttcattcatgttcattc

SEQ ID NO: 166632 - DNA, 20 bp, Homo sapiens
  source 1..20: mol_type = genomic DNA
tgttcattcatgttcattca

SEQ ID NO: 166633 - DNA, 20 bp, Homo sapiens
  source 1..20: mol_type = genomic DNA
gttcattcatgttcattcag

SEQ ID NO: 166634 - DNA, 20 bp, Homo sapiens
  source 1..20: mol_type = genomic DNA
ttcattcatgttcattcagg

SEQ ID NO: 166635 - DNA, 20 bp, Homo sapiens
  source 1..20: mol_type = genomic DNA
tcattcatgttcattcagga

SEQ ID NO: 166636 - DNA, 20 bp, Homo sapiens
  source 1..20: mol_type = genomic DNA
cattcatgttcattcaggac

SEQ ID NO: 166637 - DNA, 20 bp, Homo sapiens
  source 1..20: mol_type = genomic DNA
attcatgttcattcaggact

SEQ ID NO: 166638 - DNA, 20 bp, Homo sapiens
  source 1..20: mol_type = genomic DNA
ttcatgttcattcaggactg

SEQ ID NO: 166639 - DNA, 20 bp, Homo sapiens
  source 1..20: mol_type = genomic DNA
tcatgttcattcaggactgc

SEQ ID NO: 166640 - DNA, 20 bp, Homo sapiens
  source 1..20: mol_type = genomic DNA
catgttcattcaggactgca

SEQ ID NO: 166641 - DNA, 20 bp, Homo sapiens
  source 1..20: mol_type = genomic DNA
atgttcattcaggactgcag

SEQ ID NO: 166642 - DNA, 20 bp, Homo sapiens
  source 1..20: mol_type = genomic DNA
tgttcattcaggactgcagg

SEQ ID NO: 166643 - DNA, 20 bp, Homo sapiens
  source 1..20: mol_type = genomic DNA
gttcattcaggactgcaggt

SEQ ID NO: 166644 - DNA, 20 bp, Homo sapiens
  source 1..20: mol_type = genomic DNA
ttcattcaggactgcaggtt

SEQ ID NO: 166645 - DNA, 20 bp, Homo sapiens
  source 1..20: mol_type = genomic DNA
tcattcaggactgcaggtta

SEQ ID NO: 166646 - DNA, 20 bp, Homo sapiens
  source 1..20: mol_type = genomic DNA
cattcaggactgcaggttat

SEQ ID NO: 166647 - DNA, 20 bp, Homo sapiens
  source 1..20: mol_type = genomic DNA
attcaggactgcaggttatc

SEQ ID NO: 166648 - DNA, 20 bp, Homo sapiens
  source 1..20: mol_type = genomic DNA
ttcaggactgcaggttatca

SEQ ID NO: 166649 - DNA, 20 bp, Homo sapiens
  source 1..20: mol_type = genomic DNA
tcaggactgcaggttatcat

SEQ ID NO: 166650 - DNA, 20 bp, Homo sapiens
  source 1..20: mol_type = genomic DNA
caggactgcaggttatcatg

SEQ ID NO: 166651 - DNA, 20 bp, Homo sapiens
  source 1..20: mol_type = genomic DNA
aggactgcaggttatcatga

SEQ ID NO: 166652 - DNA, 20 bp, Homo sapiens
  source 1..20: mol_type = genomic DNA
ggactgcaggttatcatgac

SEQ ID NO: 166653 - DNA, 20 bp, Homo sapiens
  source 1..20: mol_type = genomic DNA
gactgcaggttatcatgact

SEQ ID NO: 166654 - DNA, 20 bp, Homo sapiens
  source 1..20: mol_type = genomic DNA
actgcaggttatcatgactt

SEQ ID NO: 166655 - DNA, 20 bp, Homo sapiens
  source 1..20: mol_type = genomic DNA
ctgcaggttatcatgacttg

SEQ ID NO: 166656 - DNA, 20 bp, Homo sapiens
  source 1..20: mol_type = genomic DNA
tgcaggttatcatgacttgt

SEQ ID NO: 166657 - DNA, 20 bp, Homo sapiens
  source 1..20: mol_type = genomic DNA
gcaggttatcatgacttgtt

SEQ ID NO: 166658 - DNA, 20 bp, Homo sapiens
  source 1..20: mol_type = genomic DNA
caggttatcatgacttgttt

SEQ ID NO: 166659 - DNA, 20 bp, Homo sapiens
  source 1..20: mol_type = genomic DNA
aggttatcatgacttgttta

SEQ ID NO: 166660 - DNA, 20 bp, Homo sapiens
  source 1..20: mol_type = genomic DNA
ggttatcatgacttgtttaa

SEQ ID NO: 166661 - DNA, 20 bp, Homo sapiens
  source 1..20: mol_type = genomic DNA
gttatcatgacttgtttaac

SEQ ID NO: 166662 - DNA, 20 bp, Homo sapiens
  source 1..20: mol_type = genomic DNA
ttatcatgacttgtttaact

SEQ ID NO: 166663 - DNA, 20 bp, Homo sapiens
  source 1..20: mol_type = genomic DNA
tatcatgacttgtttaactt

SEQ ID NO: 166664 - DNA, 20 bp, Homo sapiens
  source 1..20: mol_type = genomic DNA
atcatgacttgtttaacttg

SEQ ID NO: 166665 - DNA, 20 bp, Homo sapiens
  source 1..20: mol_type = genomic DNA
tcatgacttgtttaacttgt

SEQ ID NO: 166666 - DNA, 20 bp, Homo sapiens
  source 1..20: mol_type = genomic DNA
catgacttgtttaacttgtg

SEQ ID NO: 166667 - DNA, 20 bp, Homo sapiens
  source 1..20: mol_type = genomic DNA
atgacttgtttaacttgtgg

SEQ ID NO: 166668 - DNA, 20 bp, Homo sapiens
  source 1..20: mol_type = genomic DNA
tgacttgtttaacttgtggg

SEQ ID NO: 166669 - DNA, 20 bp, Homo sapiens
  source 1..20: mol_type = genomic DNA
gacttgtttaacttgtggga

SEQ ID NO: 166670 - DNA, 20 bp, Homo sapiens
  source 1..20: mol_type = genomic DNA
acttgtttaacttgtgggaa

SEQ ID NO: 166671 - DNA, 20 bp, Homo sapiens
  source 1..20: mol_type = genomic DNA
cttgtttaacttgtgggaag

SEQ ID NO: 166672 - DNA, 20 bp, Homo sapiens
  source 1..20: mol_type = genomic DNA
ttgtttaacttgtgggaagc

SEQ ID NO: 166673 - DNA, 20 bp, Homo sapiens
  source 1..20: mol_type = genomic DNA
tgtttaacttgtgggaagct

SEQ ID NO: 166674 - DNA, 20 bp, Homo sapiens
  source 1..20: mol_type = genomic DNA
gtttaacttgtgggaagctg

SEQ ID NO: 166675 - DNA, 20 bp, Homo sapiens
  source 1..20: mol_type = genomic DNA
tttaacttgtgggaagctgt

SEQ ID NO: 166676 - DNA, 20 bp, Homo sapiens
  source 1..20: mol_type = genomic DNA
ttaacttgtgggaagctgtt

SEQ ID NO: 166677 - DNA, 20 bp, Homo sapiens
  source 1..20: mol_type = genomic DNA
taacttgtgggaagctgttg

SEQ ID NO: 166678 - DNA, 20 bp, Homo sapiens
  source 1..20: mol_type = genomic DNA
aacttgtgggaagctgttgt

SEQ ID NO: 166679 - DNA, 20 bp, Homo sapiens
  source 1..20: mol_type = genomic DNA
acttgtgggaagctgttgtc

SEQ ID NO: 166680 - DNA, 20 bp, Homo sapiens
  source 1..20: mol_type = genomic DNA
cttgtgggaagctgttgtcc

SEQ ID NO: 166681 - DNA, 20 bp, Homo sapiens
  source 1..20: mol_type = genomic DNA
ttgtgggaagctgttgtccc

SEQ ID NO: 166682 - DNA, 20 bp, Homo sapiens
  source 1..20: mol_type = genomic DNA
tgtgggaagctgttgtccca

SEQ ID NO: 166683 - DNA, 20 bp, Homo sapiens
  source 1..20: mol_type = genomic DNA
gtgggaagctgttgtcccaa

SEQ ID NO: 166684 - DNA, 20 bp, Homo sapiens
  source 1..20: mol_type = genomic DNA
tgggaagctgttgtcccaag

SEQ ID NO: 166685 - DNA, 20 bp, Homo sapiens
  source 1..20: mol_type = genomic DNA
gggaagctgttgtcccaagt

SEQ ID NO: 166686 - DNA, 20 bp, Homo sapiens
  source 1..20: mol_type = genomic DNA
ggaagctgttgtcccaagtt

SEQ ID NO: 166687 - DNA, 20 bp, Homo sapiens
  source 1..20: mol_type = genomic DNA
gaagctgttgtcccaagtta

SEQ ID NO: 166688 - DNA, 20 bp, Homo sapiens
  source 1..20: mol_type = genomic DNA
aagctgttgtcccaagttat

SEQ ID NO: 166689 - DNA, 20 bp, Homo sapiens
  source 1..20: mol_type = genomic DNA
agctgttgtcccaagttatc

SEQ ID NO: 166690 - DNA, 20 bp, Homo sapiens
  source 1..20: mol_type = genomic DNA
gctgttgtcccaagttatcc

SEQ ID NO: 166691 - DNA, 20 bp, Homo sapiens
  source 1..20: mol_type = genomic DNA
ctgttgtcccaagttatcct

SEQ ID NO: 166692 - DNA, 20 bp, Homo sapiens
  source 1..20: mol_type = genomic DNA
tgttgtcccaagttatcctg

SEQ ID NO: 166693 - DNA, 20 bp, Homo sapiens
  source 1..20: mol_type = genomic DNA
gttgtcccaagttatcctgg

SEQ ID NO: 166694 - DNA, 20 bp, Homo sapiens
  source 1..20: mol_type = genomic DNA
ttgtcccaagttatcctggg

SEQ ID NO: 166695 - DNA, 20 bp, Homo sapiens
  source 1..20: mol_type = genomic DNA
tgtcccaagttatcctgggg

SEQ ID NO: 166696 - DNA, 20 bp, Homo sapiens
  source 1..20: mol_type = genomic DNA
gtcccaagttatcctgggga

SEQ ID NO: 166697 - DNA, 20 bp, Homo sapiens
  source 1..20: mol_type = genomic DNA
tcccaagttatcctggggaa

SEQ ID NO: 166698 - DNA, 20 bp, Homo sapiens
  source 1..20: mol_type = genomic DNA
cccaagttatcctggggaac

SEQ ID NO: 166699 - DNA, 20 bp, Homo sapiens
  source 1..20: mol_type = genomic DNA
ccaagttatcctggggaact

SEQ ID NO: 166700 - DNA, 20 bp, Homo sapiens
  source 1..20: mol_type = genomic DNA
caagttatcctggggaactg

SEQ ID NO: 166701 - DNA, 20 bp, Homo sapiens
  source 1..20: mol_type = genomic DNA
aagttatcctggggaactgc

SEQ ID NO: 166702 - DNA, 20 bp, Homo sapiens
  source 1..20: mol_type = genomic DNA
agttatcctggggaactgca

SEQ ID NO: 166703 - DNA, 20 bp, Homo sapiens
  source 1..20: mol_type = genomic DNA
gttatcctggggaactgcat

SEQ ID NO: 166704 - DNA, 20 bp, Homo sapiens
  source 1..20: mol_type = genomic DNA
ttatcctggggaactgcatc

SEQ ID NO: 166705 - DNA, 20 bp, Homo sapiens
  source 1..20: mol_type = genomic DNA
tatcctggggaactgcatct

SEQ ID NO: 166706 - DNA, 20 bp, Homo sapiens
  source 1..20: mol_type = genomic DNA
atcctggggaactgcatctg

SEQ ID NO: 166707 - DNA, 20 bp, Homo sapiens
  source 1..20: mol_type = genomic DNA
tcctggggaactgcatctgg

SEQ ID NO: 166708 - DNA, 20 bp, Homo sapiens
  source 1..20: mol_type = genomic DNA
cctggggaactgcatctggt

SEQ ID NO: 166709 - DNA, 20 bp, Homo sapiens
  source 1..20: mol_type = genomic DNA
ctggggaactgcatctggtt

SEQ ID NO: 166710 - DNA, 20 bp, Homo sapiens
  source 1..20: mol_type = genomic DNA
tggggaactgcatctggttc

SEQ ID NO: 166711 - DNA, 20 bp, Homo sapiens
  source 1..20: mol_type = genomic DNA
ggggaactgcatctggttct

SEQ ID NO: 166712 - DNA, 20 bp, Homo sapiens
  source 1..20: mol_type = genomic DNA
gggaactgcatctggttctt

SEQ ID NO: 166713 - DNA, 20 bp, Homo sapiens
  source 1..20: mol_type = genomic DNA
ggaactgcatctggttcttg

SEQ ID NO: 166714 - DNA, 20 bp, Homo sapiens
  source 1..20: mol_type = genomic DNA
gaactgcatctggttcttgc

SEQ ID NO: 166715 - DNA, 20 bp, Homo sapiens
  source 1..20: mol_type = genomic DNA
aactgcatctggttcttgca

SEQ ID NO: 166716 - DNA, 20 bp, Homo sapiens
  source 1..20: mol_type = genomic DNA
actgcatctggttcttgcaa

SEQ ID NO: 166717 - DNA, 20 bp, Homo sapiens
  source 1..20: mol_type = genomic DNA
ctgcatctggttcttgcaaa

SEQ ID NO: 166718 - DNA, 20 bp, Homo sapiens
  source 1..20: mol_type = genomic DNA
tgcatctggttcttgcaaaa

SEQ ID NO: 166719 - DNA, 20 bp, Homo sapiens
  source 1..20: mol_type = genomic DNA
gcatctggttcttgcaaaac

SEQ ID NO: 166720 - DNA, 20 bp, Homo sapiens
  source 1..20: mol_type = genomic DNA
catctggttcttgcaaaaca

SEQ ID NO: 166721 - DNA, 20 bp, Homo sapiens
  source 1..20: mol_type = genomic DNA
atctggttcttgcaaaacac

SEQ ID NO: 166722 - DNA, 20 bp, Homo sapiens
  source 1..20: mol_type = genomic DNA
tctggttcttgcaaaacacc

SEQ ID NO: 166723 - DNA, 20 bp, Homo sapiens
  source 1..20: mol_type = genomic DNA
ctggttcttgcaaaacacca

SEQ ID NO: 166724 - DNA, 20 bp, Homo sapiens
  source 1..20: mol_type = genomic DNA
tggttcttgcaaaacaccaa

SEQ ID NO: 166725 - DNA, 20 bp, Homo sapiens
  source 1..20: mol_type = genomic DNA
ggttcttgcaaaacaccaag

SEQ ID NO: 166726 - DNA, 20 bp, Homo sapiens
  source 1..20: mol_type = genomic DNA
gttcttgcaaaacaccaagt

SEQ ID NO: 166727 - DNA, 20 bp, Homo sapiens
  source 1..20: mol_type = genomic DNA
ttcttgcaaaacaccaagta

SEQ ID NO: 166728 - DNA, 20 bp, Homo sapiens
  source 1..20: mol_type = genomic DNA
tcttgcaaaacaccaagtag

SEQ ID NO: 166729 - DNA, 20 bp, Homo sapiens
  source 1..20: mol_type = genomic DNA
cttgcaaaacaccaagtaga

SEQ ID NO: 166730 - DNA, 20 bp, Homo sapiens
  source 1..20: mol_type = genomic DNA
ttgcaaaacaccaagtagac

SEQ ID NO: 166731 - DNA, 20 bp, Homo sapiens
  source 1..20: mol_type = genomic DNA
tgcaaaacaccaagtagaca

SEQ ID NO: 166732 - DNA, 20 bp, Homo sapiens
  source 1..20: mol_type = genomic DNA
gcaaaacaccaagtagacag

SEQ ID NO: 166733 - DNA, 20 bp, Homo sapiens
  source 1..20: mol_type = genomic DNA
caaaacaccaagtagacagg

SEQ ID NO: 166734 - DNA, 20 bp, Homo sapiens
  source 1..20: mol_type = genomic DNA
aaaacaccaagtagacaggc

SEQ ID NO: 166735 - DNA, 20 bp, Homo sapiens
  source 1..20: mol_type = genomic DNA
aaacaccaagtagacaggct

SEQ ID NO: 166736 - DNA, 20 bp, Homo sapiens
  source 1..20: mol_type = genomic DNA
aacaccaagtagacaggctc

SEQ ID NO: 166737 - DNA, 20 bp, Homo sapiens
  source 1..20: mol_type = genomic DNA
acaccaagtagacaggctct

SEQ ID NO: 166738 - DNA, 20 bp, Homo sapiens
  source 1..20: mol_type = genomic DNA
caccaagtagacaggctctc

SEQ ID NO: 166739 - DNA, 20 bp, Homo sapiens
  source 1..20: mol_type = genomic DNA
accaagtagacaggctctct

SEQ ID NO: 166740 - DNA, 20 bp, Homo sapiens
  source 1..20: mol_type = genomic DNA
ccaagtagacaggctctctt

SEQ ID NO: 166741 - DNA, 20 bp, Homo sapiens
  source 1..20: mol_type = genomic DNA
caagtagacaggctctcttt

SEQ ID NO: 166742 - DNA, 20 bp, Homo sapiens
  source 1..20: mol_type = genomic DNA
aagtagacaggctctctttt

SEQ ID NO: 166743 - DNA, 20 bp, Homo sapiens
  source 1..20: mol_type = genomic DNA
agtagacaggctctctttta

SEQ ID NO: 166744 - DNA, 20 bp, Homo sapiens
  source 1..20: mol_type = genomic DNA
gtagacaggctctcttttac

SEQ ID NO: 166745 - DNA, 20 bp, Homo sapiens
  source 1..20: mol_type = genomic DNA
tagacaggctctcttttacc

SEQ ID NO: 166746 - DNA, 20 bp, Homo sapiens
  source 1..20: mol_type = genomic DNA
agacaggctctcttttacct

SEQ ID NO: 166747 - DNA, 20 bp, Homo sapiens
  source 1..20: mol_type = genomic DNA
gacaggctctcttttacctc

SEQ ID NO: 166748 - DNA, 20 bp, Homo sapiens
  source 1..20: mol_type = genomic DNA
acaggctctcttttacctcc

SEQ ID NO: 166749 - DNA, 20 bp, Homo sapiens
  source 1..20: mol_type = genomic DNA
caggctctcttttacctccc

SEQ ID NO: 166750 - DNA, 20 bp, Homo sapiens
  source 1..20: mol_type = genomic DNA
aggctctcttttacctcccc

SEQ ID NO: 166751 - DNA, 20 bp, Homo sapiens
  source 1..20: mol_type = genomic DNA
ggctctcttttacctcccct

SEQ ID NO: 166752 - DNA, 20 bp, Homo sapiens
  source 1..20: mol_type = genomic DNA
gctctcttttacctcccctt

SEQ ID NO: 166753 - DNA, 20 bp, Homo sapiens
  source 1..20: mol_type = genomic DNA
ctctcttttacctccccttg

SEQ ID NO: 166754 - DNA, 20 bp, Homo sapiens
  source 1..20: mol_type = genomic DNA
tctcttttacctccccttga

SEQ ID NO: 166755 - DNA, 20 bp, Homo sapiens
  source 1..20: mol_type = genomic DNA
ctcttttacctccccttgag

SEQ ID NO: 166756 - DNA, 20 bp, Homo sapiens
  source 1..20: mol_type = genomic DNA
tcttttacctccccttgagg

SEQ ID NO: 166757 - DNA, 20 bp, Homo sapiens
  source 1..20: mol_type = genomic DNA
cttttacctccccttgaggg

SEQ ID NO: 166758 - DNA, 20 bp, Homo sapiens
  source 1..20: mol_type = genomic DNA
ttttacctccccttgagggc

SEQ ID NO: 166759 - DNA, 20 bp, Homo sapiens
  source 1..20: mol_type = genomic DNA
tttacctccccttgagggca

SEQ ID NO: 166760 - DNA, 20 bp, Homo sapiens
  source 1..20: mol_type = genomic DNA
ttacctccccttgagggcat

SEQ ID NO: 166761 - DNA, 20 bp, Homo sapiens
  source 1..20: mol_type = genomic DNA
tacctccccttgagggcatt

SEQ ID NO: 166762 - DNA, 20 bp, Homo sapiens
  source 1..20: mol_type = genomic DNA
acctccccttgagggcatta

SEQ ID NO: 166763 - DNA, 20 bp, Homo sapiens
  source 1..20: mol_type = genomic DNA
cctccccttgagggcattaa

SEQ ID NO: 166764 - DNA, 20 bp, Homo sapiens
  source 1..20: mol_type = genomic DNA
ctccccttgagggcattaac

SEQ ID NO: 166765 - DNA, 20 bp, Homo sapiens
  source 1..20: mol_type = genomic DNA
tccccttgagggcattaaca

SEQ ID NO: 166766 - DNA, 20 bp, Homo sapiens
  source 1..20: mol_type = genomic DNA
ccccttgagggcattaacat

SEQ ID NO: 166767 - DNA, 20 bp, Homo sapiens
  source 1..20: mol_type = genomic DNA
cccttgagggcattaacatt

SEQ ID NO: 166768 - DNA, 20 bp, Homo sapiens
  source 1..20: mol_type = genomic DNA
ccttgagggcattaacattc

SEQ ID NO: 166769 - DNA, 20 bp, Homo sapiens
  source 1..20: mol_type = genomic DNA
cttgagggcattaacattca

SEQ ID NO: 166770 - DNA, 20 bp, Homo sapiens
  source 1..20: mol_type = genomic DNA
ttgagggcattaacattcag

SEQ ID NO: 166771 - DNA, 20 bp, Homo sapiens
  source 1..20: mol_type = genomic DNA
tgagggcattaacattcagt

SEQ ID NO: 166772 - DNA, 20 bp, Homo sapiens
  source 1..20: mol_type = genomic DNA
gagggcattaacattcagta

SEQ ID NO: 166773 - DNA, 20 bp, Homo sapiens
  source 1..20: mol_type = genomic DNA
agggcattaacattcagtag

SEQ ID NO: 166774 - DNA, 20 bp, Homo sapiens
  source 1..20: mol_type = genomic DNA
gggcattaacattcagtagt

SEQ ID NO: 166775 - DNA, 20 bp, Homo sapiens
  source 1..20: mol_type = genomic DNA
ggcattaacattcagtagtc

SEQ ID NO: 166776 - DNA, 20 bp, Homo sapiens
  source 1..20: mol_type = genomic DNA
gcattaacattcagtagtca

SEQ ID NO: 166777 - DNA, 20 bp, Homo sapiens
  source 1..20: mol_type = genomic DNA
cattaacattcagtagtcac

SEQ ID NO: 166778 - DNA, 20 bp, Homo sapiens
  source 1..20: mol_type = genomic DNA
attaacattcagtagtcact

SEQ ID NO: 166779 - DNA, 20 bp, Homo sapiens
  source 1..20: mol_type = genomic DNA
ttaacattcagtagtcactt

SEQ ID NO: 166780 - DNA, 20 bp, Homo sapiens
  source 1..20: mol_type = genomic DNA
taacattcagtagtcacttc

SEQ ID NO: 166781 - DNA, 20 bp, Homo sapiens
  source 1..20: mol_type = genomic DNA
aacattcagtagtcacttcc

SEQ ID NO: 166782 - DNA, 20 bp, Homo sapiens
  source 1..20: mol_type = genomic DNA
acattcagtagtcacttcca

SEQ ID NO: 166783 - DNA, 20 bp, Homo sapiens
  source 1..20: mol_type = genomic DNA
cattcagtagtcacttccat

SEQ ID NO: 166784 - DNA, 20 bp, Homo sapiens
  source 1..20: mol_type = genomic DNA
attcagtagtcacttccatt

SEQ ID NO: 166785 - DNA, 20 bp, Homo sapiens
  source 1..20: mol_type = genomic DNA
ttcagtagtcacttccattc

SEQ ID NO: 166786 - DNA, 20 bp, Homo sapiens
  source 1..20: mol_type = genomic DNA
tcagtagtcacttccattca

SEQ ID NO: 166787 - DNA, 20 bp, Homo sapiens
  source 1..20: mol_type = genomic DNA
cagtagtcacttccattcag

SEQ ID NO: 166788 - DNA, 20 bp, Homo sapiens
  source 1..20: mol_type = genomic DNA
agtagtcacttccattcagt

SEQ ID NO: 166789 - DNA, 20 bp, Homo sapiens
  source 1..20: mol_type = genomic DNA
gtagtcacttccattcagtt

SEQ ID NO: 166790 - DNA, 20 bp, Homo sapiens
  source 1..20: mol_type = genomic DNA
tagtcacttccattcagtta

SEQ ID NO: 166791 - DNA, 20 bp, Homo sapiens
  source 1..20: mol_type = genomic DNA
agtcacttccattcagttaa

SEQ ID NO: 166792 - DNA, 20 bp, Homo sapiens
  source 1..20: mol_type = genomic DNA
gtcacttccattcagttaac

SEQ ID NO: 166793 - DNA, 20 bp, Homo sapiens
  source 1..20: mol_type = genomic DNA
tcacttccattcagttaacc

SEQ ID NO: 166794 - DNA, 20 bp, Homo sapiens
  source 1..20: mol_type = genomic DNA
cacttccattcagttaaccc

SEQ ID NO: 166795 - DNA, 20 bp, Homo sapiens
  source 1..20: mol_type = genomic DNA
acttccattcagttaaccct

SEQ ID NO: 166796 - DNA, 20 bp, Homo sapiens
  source 1..20: mol_type = genomic DNA
cttccattcagttaaccctt

SEQ ID NO: 166797 - DNA, 20 bp, Homo sapiens
  source 1..20: mol_type = genomic DNA
ttccattcagttaacccttt

SEQ ID NO: 166798 - DNA, 20 bp, Homo sapiens
  source 1..20: mol_type = genomic DNA
tccattcagttaacccttta

SEQ ID NO: 166799 - DNA, 20 bp, Homo sapiens
  source 1..20: mol_type = genomic DNA
ccattcagttaaccctttat

SEQ ID NO: 166800 - DNA, 20 bp, Homo sapiens
  source 1..20: mol_type = genomic DNA
cattcagttaaccctttatt

SEQ ID NO: 166801 - DNA, 20 bp, Homo sapiens
  source 1..20: mol_type = genomic DNA
attcagttaaccctttattt

SEQ ID NO: 166802 - DNA, 20 bp, Homo sapiens
  source 1..20: mol_type = genomic DNA
ttcagttaaccctttatttt

SEQ ID NO: 166803 - DNA, 20 bp, Homo sapiens
  source 1..20: mol_type = genomic DNA
tcagttaaccctttattttt

SEQ ID NO: 166804 - DNA, 20 bp, Homo sapiens
  source 1..20: mol_type = genomic DNA
cagttaaccctttattttta

SEQ ID NO: 166805 - DNA, 20 bp, Homo sapiens
  source 1..20: mol_type = genomic DNA
agttaaccctttatttttat

SEQ ID NO: 166806 - DNA, 20 bp, Homo sapiens
  source 1..20: mol_type = genomic DNA
gttaaccctttatttttatg

SEQ ID NO: 166807 - DNA, 20 bp, Homo sapiens
  source 1..20: mol_type = genomic DNA
ttaaccctttatttttatgg

SEQ ID NO: 166808 - DNA, 20 bp, Homo sapiens
  source 1..20: mol_type = genomic DNA
taaccctttatttttatggt

SEQ ID NO: 166809 - DNA, 20 bp, Homo sapiens
  source 1..20: mol_type = genomic DNA
aaccctttatttttatggtt

SEQ ID NO: 166810 - DNA, 20 bp, Homo sapiens
  source 1..20: mol_type = genomic DNA
accctttatttttatggttt

SEQ ID NO: 166811 - DNA, 20 bp, Homo sapiens
  source 1..20: mol_type = genomic DNA
ccctttatttttatggtttt

SEQ ID NO: 166812 - DNA, 20 bp, Homo sapiens
  source 1..20: mol_type = genomic DNA
cctttatttttatggttttt

SEQ ID NO: 166813 - DNA, 20 bp, Homo sapiens
  source 1..20: mol_type = genomic DNA
ctttatttttatggtttttc

SEQ ID NO: 166814 - DNA, 20 bp, Homo sapiens
  source 1..20: mol_type = genomic DNA
tttatttttatggtttttct

SEQ ID NO: 166815 - DNA, 20 bp, Homo sapiens
  source 1..20: mol_type = genomic DNA
ttatttttatggtttttctt

SEQ ID NO: 166816 - DNA, 20 bp, Homo sapiens
  source 1..20: mol_type = genomic DNA
tatttttatggtttttcttg

SEQ ID NO: 166817 - DNA, 20 bp, Homo sapiens
  source 1..20: mol_type = genomic DNA
atttttatggtttttcttga

SEQ ID NO: 166818 - DNA, 20 bp, Homo sapiens
  source 1..20: mol_type = genomic DNA
tttttatggtttttcttgag

SEQ ID NO: 166819 - DNA, 20 bp, Homo sapiens
  source 1..20: mol_type = genomic DNA
ttttatggtttttcttgagc

SEQ ID NO: 166820 - DNA, 20 bp, Homo sapiens
  source 1..20: mol_type = genomic DNA
tttatggtttttcttgagcc

SEQ ID NO: 166821 - DNA, 20 bp, Homo sapiens
  source 1..20: mol_type = genomic DNA
ttatggtttttcttgagcca

SEQ ID NO: 166822 - DNA, 20 bp, Homo sapiens
  source 1..20: mol_type = genomic DNA
tatggtttttcttgagccat

SEQ ID NO: 166823 - DNA, 20 bp, Homo sapiens
  source 1..20: mol_type = genomic DNA
atggtttttcttgagccata

SEQ ID NO: 166824 - DNA, 20 bp, Homo sapiens
  source 1..20: mol_type = genomic DNA
tggtttttcttgagccatag

SEQ ID NO: 166825 - DNA, 20 bp, Homo sapiens
  source 1..20: mol_type = genomic DNA
ggtttttcttgagccatagt

SEQ ID NO: 166826 - DNA, 20 bp, Homo sapiens
  source 1..20: mol_type = genomic DNA
gtttttcttgagccatagtt

SEQ ID NO: 166827 - DNA, 20 bp, Homo sapiens
  source 1..20: mol_type = genomic DNA
tttttcttgagccatagttg

SEQ ID NO: 166828 - DNA, 20 bp, Homo sapiens
  source 1..20: mol_type = genomic DNA
ttttcttgagccatagttgt

SEQ ID NO: 166829 - DNA, 20 bp, Homo sapiens
  source 1..20: mol_type = genomic DNA
tttcttgagccatagttgta

SEQ ID NO: 166830 - DNA, 20 bp, Homo sapiens
  source 1..20: mol_type = genomic DNA
ttcttgagccatagttgtaa

SEQ ID NO: 166831 - DNA, 20 bp, Homo sapiens
  source 1..20: mol_type = genomic DNA
tcttgagccatagttgtaaa

SEQ ID NO: 166832 - DNA, 20 bp, Homo sapiens
  source 1..20: mol_type = genomic DNA
cttgagccatagttgtaaag

SEQ ID NO: 166833 - DNA, 20 bp, Homo sapiens
  source 1..20: mol_type = genomic DNA
ttgagccatagttgtaaagc

SEQ ID NO: 166834 - DNA, 20 bp, Homo sapiens
  source 1..20: mol_type = genomic DNA
tgagccatagttgtaaagca

SEQ ID NO: 166835 - DNA, 20 bp, Homo sapiens
  source 1..20: mol_type = genomic DNA
gagccatagttgtaaagcag

SEQ ID NO: 166836 - DNA, 20 bp, Homo sapiens
  source 1..20: mol_type = genomic DNA
agccatagttgtaaagcaga

SEQ ID NO: 166837 - DNA, 20 bp, Homo sapiens
  source 1..20: mol_type = genomic DNA
gccatagttgtaaagcagaa

SEQ ID NO: 166838 - DNA, 20 bp, Homo sapiens
  source 1..20: mol_type = genomic DNA
ccatagttgtaaagcagaaa

SEQ ID NO: 166839 - DNA, 20 bp, Homo sapiens
  source 1..20: mol_type = genomic DNA
catagttgtaaagcagaaaa

SEQ ID NO: 166840 - DNA, 20 bp, Homo sapiens
  source 1..20: mol_type = genomic DNA
atagttgtaaagcagaaaaa

SEQ ID NO: 166841 - DNA, 20 bp, Homo sapiens
  source 1..20: mol_type = genomic DNA
tagttgtaaagcagaaaaat

SEQ ID NO: 166842 - DNA, 20 bp, Homo sapiens
  source 1..20: mol_type = genomic DNA
agttgtaaagcagaaaaatc

SEQ ID NO: 166843 - DNA, 20 bp, Homo sapiens
  source 1..20: mol_type = genomic DNA
gttgtaaagcagaaaaatca

SEQ ID NO: 166844 - DNA, 20 bp, Homo sapiens
  source 1..20: mol_type = genomic DNA
ttgtaaagcagaaaaatcat

SEQ ID NO: 166845 - DNA, 20 bp, Homo sapiens
  source 1..20: mol_type = genomic DNA
tgtaaagcagaaaaatcatt

SEQ ID NO: 166846 - DNA, 20 bp, Homo sapiens
  source 1..20: mol_type = genomic DNA
gtaaagcagaaaaatcattt

SEQ ID NO: 166847 - DNA, 20 bp, Homo sapiens
  source 1..20: mol_type = genomic DNA
taaagcagaaaaatcattta

SEQ ID NO: 166848 - DNA, 20 bp, Homo sapiens
  source 1..20: mol_type = genomic DNA
aaagcagaaaaatcatttat

SEQ ID NO: 166849 - DNA, 20 bp, Homo sapiens
  source 1..20: mol_type = genomic DNA
aagcagaaaaatcatttata

SEQ ID NO: 166850 - DNA, 20 bp, Homo sapiens
  source 1..20: mol_type = genomic DNA
agcagaaaaatcatttataa

SEQ ID NO: 166851 - DNA, 20 bp, Homo sapiens
  source 1..20: mol_type = genomic DNA
gcagaaaaatcatttataaa

SEQ ID NO: 166852 - DNA, 20 bp, Homo sapiens
  source 1..20: mol_type = genomic DNA
cagaaaaatcatttataaag

SEQ ID NO: 166853 - DNA, 20 bp, Homo sapiens
  source 1..20: mol_type = genomic DNA
agaaaaatcatttataaagg

SEQ ID NO: 166854 - DNA, 20 bp, Homo sapiens
  source 1..20: mol_type = genomic DNA
gaaaaatcatttataaaggt

SEQ ID NO: 166855 - DNA, 20 bp, Homo sapiens
  source 1..20: mol_type = genomic DNA
aaaaatcatttataaaggtt

SEQ ID NO: 166856 - DNA, 20 bp, Homo sapiens
  source 1..20: mol_type = genomic DNA
aaaatcatttataaaggttt

SEQ ID NO: 166857 - DNA, 20 bp, Homo sapiens
  source 1..20: mol_type = genomic DNA
aaatcatttataaaggtttg

SEQ ID NO: 166858 - DNA, 20 bp, Homo sapiens
  source 1..20: mol_type = genomic DNA
aatcatttataaaggtttgt

SEQ ID NO: 166859 - DNA, 20 bp, Homo sapiens
  source 1..20: mol_type = genomic DNA
atcatttataaaggtttgtt

SEQ ID NO: 166860 - DNA, 20 bp, Homo sapiens
  source 1..20: mol_type = genomic DNA
tcatttataaaggtttgttg

SEQ ID NO: 166861 - DNA, 20 bp, Homo sapiens
  source 1..20: mol_type = genomic DNA
catttataaaggtttgttga

SEQ ID NO: 166862 - DNA, 20 bp, Homo sapiens
  source 1..20: mol_type = genomic DNA
atttataaaggtttgttgaa

SEQ ID NO: 166863 - DNA, 20 bp, Homo sapiens
  source 1..20: mol_type = genomic DNA
tttataaaggtttgttgaac

SEQ ID NO: 166864 - DNA, 20 bp, Homo sapiens
  source 1..20: mol_type = genomic DNA
ttataaaggtttgttgaaca

SEQ ID NO: 166865 - DNA, 20 bp, Homo sapiens
  source 1..20: mol_type = genomic DNA
tataaaggtttgttgaacaa

SEQ ID NO: 166866 - DNA, 20 bp, Homo sapiens
  source 1..20: mol_type = genomic DNA
ataaaggtttgttgaacaaa

SEQ ID NO: 166867 - DNA, 20 bp, Homo sapiens
  source 1..20: mol_type = genomic DNA
taaaggtttgttgaacaaaa

SEQ ID NO: 166868 - DNA, 20 bp, Homo sapiens
  source 1..20: mol_type = genomic DNA
aaaggtttgttgaacaaaat

SEQ ID NO: 166869 - DNA, 20 bp, Homo sapiens
  source 1..20: mol_type = genomic DNA
aaggtttgttgaacaaaatt

SEQ ID NO: 166870 - DNA, 20 bp, Homo sapiens
  source 1..20: mol_type = genomic DNA
aggtttgttgaacaaaattc

SEQ ID NO: 166871 - DNA, 20 bp, Homo sapiens
  source 1..20: mol_type = genomic DNA
ggtttgttgaacaaaattca

SEQ ID NO: 166872 - DNA, 20 bp, Homo sapiens
  source 1..20: mol_type = genomic DNA
gtttgttgaacaaaattcaa

SEQ ID NO: 166873 - DNA, 20 bp, Homo sapiens
  source 1..20: mol_type = genomic DNA
tttgttgaacaaaattcaaa

SEQ ID NO: 166874 - DNA, 20 bp, Homo sapiens
  source 1..20: mol_type = genomic DNA
ttgttgaacaaaattcaaaa

SEQ ID NO: 166875 - DNA, 20 bp, Homo sapiens
  source 1..20: mol_type = genomic DNA
tgttgaacaaaattcaaaat

SEQ ID NO: 166876 - DNA, 20 bp, Homo sapiens
  source 1..20: mol_type = genomic DNA
gttgaacaaaattcaaaata

SEQ ID NO: 166877 - DNA, 20 bp, Homo sapiens
  source 1..20: mol_type = genomic DNA
ttgaacaaaattcaaaatac

SEQ ID NO: 166878 - DNA, 20 bp, Homo sapiens
  source 1..20: mol_type = genomic DNA
tgaacaaaattcaaaatact

SEQ ID NO: 166879 - DNA, 20 bp, Homo sapiens
  source 1..20: mol_type = genomic DNA
gaacaaaattcaaaatactg

SEQ ID NO: 166880 - DNA, 20 bp, Homo sapiens
  source 1..20: mol_type = genomic DNA
aacaaaattcaaaatactgt

SEQ ID NO: 166881 - DNA, 20 bp, Homo sapiens
  source 1..20: mol_type = genomic DNA
acaaaattcaaaatactgtt

SEQ ID NO: 166882 - DNA, 20 bp, Homo sapiens
  source 1..20: mol_type = genomic DNA
caaaattcaaaatactgttg

SEQ ID NO: 166883 - DNA, 20 bp, Homo sapiens
  source 1..20: mol_type = genomic DNA
aaaattcaaaatactgttgc

SEQ ID NO: 166884 - DNA, 20 bp, Homo sapiens
  source 1..20: mol_type = genomic DNA
aaattcaaaatactgttgct

SEQ ID NO: 166885 - DNA, 20 bp, Homo sapiens
  source 1..20: mol_type = genomic DNA
aattcaaaatactgttgctt

SEQ ID NO: 166886 - DNA, 20 bp, Homo sapiens
  source 1..20: mol_type = genomic DNA
attcaaaatactgttgctta

SEQ ID NO: 166887 - DNA, 20 bp, Homo sapiens
  source 1..20: mol_type = genomic DNA
ttcaaaatactgttgcttaa

SEQ ID NO: 166888 - DNA, 20 bp, Homo sapiens
  source 1..20: mol_type = genomic DNA
tcaaaatactgttgcttaaa

SEQ ID NO: 166889 - DNA, 20 bp, Homo sapiens
  source 1..20: mol_type = genomic DNA
caaaatactgttgcttaaag

SEQ ID NO: 166890 - DNA, 20 bp, Homo sapiens
  source 1..20: mol_type = genomic DNA
aaaatactgttgcttaaagt

SEQ ID NO: 166891 - DNA, 20 bp, Homo sapiens
  source 1..20: mol_type = genomic DNA
aaatactgttgcttaaagta

SEQ ID NO: 166892 - DNA, 20 bp, Homo sapiens
  source 1..20: mol_type = genomic DNA
aatactgttgcttaaagtat

SEQ ID NO: 166893 - DNA, 20 bp, Homo sapiens
  source 1..20: mol_type = genomic DNA
atactgttgcttaaagtatt

SEQ ID NO: 166894 - DNA, 20 bp, Homo sapiens
  source 1..20: mol_type = genomic DNA
tactgttgcttaaagtatta

SEQ ID NO: 166895 - DNA, 20 bp, Homo sapiens
  source 1..20: mol_type = genomic DNA
actgttgcttaaagtattaa

SEQ ID NO: 166896 - DNA, 20 bp, Homo sapiens
  source 1..20: mol_type = genomic DNA
ctgttgcttaaagtattaag

SEQ ID NO: 166897 - DNA, 20 bp, Homo sapiens
  source 1..20: mol_type = genomic DNA
tgttgcttaaagtattaaga

SEQ ID NO: 166898 - DNA, 20 bp, Homo sapiens
  source 1..20: mol_type = genomic DNA
gttgcttaaagtattaagat

SEQ ID NO: 166899 - DNA, 20 bp, Homo sapiens
  source 1..20: mol_type = genomic DNA
ttgcttaaagtattaagatt

SEQ ID NO: 166900 - DNA, 20 bp, Homo sapiens
  source 1..20: mol_type = genomic DNA
tgcttaaagtattaagattt

SEQ ID NO: 166901 - DNA, 20 bp, Homo sapiens
  source 1..20: mol_type = genomic DNA
gcttaaagtattaagatttt

SEQ ID NO: 166902 - DNA, 20 bp, Homo sapiens
  source 1..20: mol_type = genomic DNA
cttaaagtattaagattttt

SEQ ID NO: 166903 - DNA, 20 bp, Homo sapiens
  source 1..20: mol_type = genomic DNA
ttaaagtattaagatttttt

SEQ ID NO: 166904 - DNA, 20 bp, Homo sapiens
  source 1..20: mol_type = genomic DNA
taaagtattaagatttttta

SEQ ID NO: 166905 - DNA, 20 bp, Homo sapiens
  source 1..20: mol_type = genomic DNA
aaagtattaagattttttag

SEQ ID NO: 166906 - DNA, 20 bp, Homo sapiens
  source 1..20: mol_type = genomic DNA
aagtattaagattttttagg

SEQ ID NO: 166907 - DNA, 20 bp, Homo sapiens
  source 1..20: mol_type = genomic DNA
agtattaagattttttagga

SEQ ID NO: 166908 - DNA, 20 bp, Homo sapiens
  source 1..20: mol_type = genomic DNA
gtattaagattttttaggat

SEQ ID NO: 166909 - DNA, 20 bp, Homo sapiens
  source 1..20: mol_type = genomic DNA
tattaagattttttaggatt

SEQ ID NO: 166910 - DNA, 20 bp, Homo sapiens
  source 1..20: mol_type = genomic DNA
attaagattttttaggatta

SEQ ID NO: 166911 - DNA, 20 bp, Homo sapiens
  source 1..20: mol_type = genomic DNA
ttaagattttttaggattat

SEQ ID NO: 166912 - DNA, 20 bp, Homo sapiens
  source 1..20: mol_type = genomic DNA
taagattttttaggattata

SEQ ID NO: 166913 - DNA, 20 bp, Homo sapiens
  source 1..20: mol_type = genomic DNA
aagattttttaggattatac

SEQ ID NO: 166914 - DNA, 20 bp, Homo sapiens
  source 1..20: mol_type = genomic DNA
agattttttaggattatacc

SEQ ID NO: 166915 - DNA, 20 bp, Homo sapiens
  source 1..20: mol_type = genomic DNA
gattttttaggattatacct

SEQ ID NO: 166916 - DNA, 20 bp, Homo sapiens
  source 1..20: mol_type = genomic DNA
attttttaggattatacctt

SEQ ID NO: 166917 - DNA, 20 bp, Homo sapiens
  source 1..20: mol_type = genomic DNA
ttttttaggattatacctta

SEQ ID NO: 166918 - DNA, 20 bp, Homo sapiens
  source 1..20: mol_type = genomic DNA
tttttaggattataccttac

SEQ ID NO: 166919 - DNA, 20 bp, Homo sapiens
  source 1..20: mol_type = genomic DNA
ttttaggattataccttact

SEQ ID NO: 166920 - DNA, 20 bp, Homo sapiens
  source 1..20: mol_type = genomic DNA
tttaggattataccttactt

SEQ ID NO: 166921 - DNA, 20 bp, Homo sapiens
  source 1..20: mol_type = genomic DNA
ttaggattataccttactta

SEQ ID NO: 166922 - DNA, 20 bp, Homo sapiens
  source 1..20: mol_type = genomic DNA
taggattataccttacttat

SEQ ID NO: 166923 - DNA, 20 bp, Homo sapiens
  source 1..20: mol_type = genomic DNA
aggattataccttacttata

SEQ ID NO: 166924 - DNA, 20 bp, Homo sapiens
  source 1..20: mol_type = genomic DNA
ggattataccttacttatag

SEQ ID NO: 166925 - DNA, 20 bp, Homo sapiens
  source 1..20: mol_type = genomic DNA
gattataccttacttatagg

SEQ ID NO: 166926 - DNA, 20 bp, Homo sapiens
  source 1..20: mol_type = genomic DNA
attataccttacttataggc

SEQ ID NO: 166927 - DNA, 20 bp, Homo sapiens
  source 1..20: mol_type = genomic DNA
ttataccttacttataggcc

SEQ ID NO: 166928 - DNA, 20 bp, Homo sapiens
  source 1..20: mol_type = genomic DNA
tataccttacttataggccc

SEQ ID NO: 166929 - DNA, 20 bp, Homo sapiens
  source 1..20: mol_type = genomic DNA
ataccttacttataggcccg

SEQ ID NO: 166930 - DNA, 20 bp, Homo sapiens
  source 1..20: mol_type = genomic DNA
taccttacttataggcccgt

SEQ ID NO: 166931 - DNA, 20 bp, Homo sapiens
  source 1..20: mol_type = genomic DNA
accttacttataggcccgtc

SEQ ID NO: 166932 - DNA, 20 bp, Homo sapiens
  source 1..20: mol_type = genomic DNA
ccttacttataggcccgtca

SEQ ID NO: 166933 - DNA, 20 bp, Homo sapiens
  source 1..20: mol_type = genomic DNA
cttacttataggcccgtcat

SEQ ID NO: 166934 - DNA, 20 bp, Homo sapiens
  source 1..20: mol_type = genomic DNA
ttacttataggcccgtcatt

SEQ ID NO: 166935 - DNA, 20 bp, Homo sapiens
  source 1..20: mol_type = genomic DNA
tacttataggcccgtcattc

SEQ ID NO: 166936 - DNA, 20 bp, Homo sapiens
  source 1..20: mol_type = genomic DNA
acttataggcccgtcattca

SEQ ID NO: 166937 - DNA, 20 bp, Homo sapiens
  source 1..20: mol_type = genomic DNA
cttataggcccgtcattcat

SEQ ID NO: 166938 - DNA, 20 bp, Homo sapiens
  source 1..20: mol_type = genomic DNA
ttataggcccgtcattcatt

SEQ ID NO: 166939 - DNA, 20 bp, Homo sapiens
  source 1..20: mol_type = genomic DNA
tataggcccgtcattcattt

SEQ ID NO: 166940 - DNA, 20 bp, Homo sapiens
  source 1..20: mol_type = genomic DNA
ataggcccgtcattcatttg

SEQ ID NO: 166941 - DNA, 20 bp, Homo sapiens
  source 1..20: mol_type = genomic DNA
taggcccgtcattcatttgg

SEQ ID NO: 166942 - DNA, 20 bp, Homo sapiens
  source 1..20: mol_type = genomic DNA
aggcccgtcattcatttggc

SEQ ID NO: 166943 - DNA, 20 bp, Homo sapiens
  source 1..20: mol_type = genomic DNA
ggcccgtcattcatttggca

SEQ ID NO: 166944 - DNA, 20 bp, Homo sapiens
  source 1..20: mol_type = genomic DNA
gcccgtcattcatttggcat

SEQ ID NO: 166945 - DNA, 20 bp, Homo sapiens
  source 1..20: mol_type = genomic DNA
cccgtcattcatttggcatg

SEQ ID NO: 166946 - DNA, 20 bp, Homo sapiens
  source 1..20: mol_type = genomic DNA
ccgtcattcatttggcatga

SEQ ID NO: 166947 - DNA, 20 bp, Homo sapiens
  source 1..20: mol_type = genomic DNA
cgtcattcatttggcatgaa

SEQ ID NO: 166948 - DNA, 20 bp, Homo sapiens
  source 1..20: mol_type = genomic DNA
gtcattcatttggcatgaaa

SEQ ID NO: 166949 - DNA, 20 bp, Homo sapiens
  source 1..20: mol_type = genomic DNA
tcattcatttggcatgaaat

SEQ ID NO: 166950 - DNA, 20 bp, Homo sapiens
  source 1..20: mol_type = genomic DNA
cattcatttggcatgaaatt

SEQ ID NO: 166951 - DNA, 20 bp, Homo sapiens
  source 1..20: mol_type = genomic DNA
attcatttggcatgaaattt

SEQ ID NO: 166952 - DNA, 20 bp, Homo sapiens
  source 1..20: mol_type = genomic DNA
ttcatttggcatgaaatttt

SEQ ID NO: 166953 - DNA, 20 bp, Homo sapiens
  source 1..20: mol_type = genomic DNA
tcatttggcatgaaattttg

SEQ ID NO: 166954 - DNA, 20 bp, Homo sapiens
  source 1..20: mol_type = genomic DNA
catttggcatgaaattttga

SEQ ID NO: 166955 - DNA, 20 bp, Homo sapiens
  source 1..20: mol_type = genomic DNA
atttggcatgaaattttgag

SEQ ID NO: 166956 - DNA, 20 bp, Homo sapiens
  source 1..20: mol_type = genomic DNA
tttggcatgaaattttgagt

SEQ ID NO: 166957 - DNA, 20 bp, Homo sapiens
  source 1..20: mol_type = genomic DNA
ttggcatgaaattttgagtt

SEQ ID NO: 166958 - DNA, 20 bp, Homo sapiens
  source 1..20: mol_type = genomic DNA
tggcatgaaattttgagttt

SEQ ID NO: 166959 - DNA, 20 bp, Homo sapiens
  source 1..20: mol_type = genomic DNA
ggcatgaaattttgagtttt

SEQ ID NO: 166960 - DNA, 20 bp, Homo sapiens
  source 1..20: mol_type = genomic DNA
gcatgaaattttgagtttta

SEQ ID NO: 166961 - DNA, 20 bp, Homo sapiens
  source 1..20: mol_type = genomic DNA
catgaaattttgagttttat

SEQ ID NO: 166962 - DNA, 20 bp, Homo sapiens
  source 1..20: mol_type = genomic DNA
atgaaattttgagttttatt

SEQ ID NO: 166963 - DNA, 20 bp, Homo sapiens
  source 1..20: mol_type = genomic DNA
tgaaattttgagttttattc

SEQ ID NO: 166964 - DNA, 20 bp, Homo sapiens
  source 1..20: mol_type = genomic DNA
gaaattttgagttttattca

SEQ ID NO: 166965 - DNA, 20 bp, Homo sapiens
  source 1..20: mol_type = genomic DNA
aaattttgagttttattcac

SEQ ID NO: 166966 - DNA, 20 bp, Homo sapiens
  source 1..20: mol_type = genomic DNA
aattttgagttttattcact

SEQ ID NO: 166967 - DNA, 20 bp, Homo sapiens
  source 1..20: mol_type = genomic DNA
attttgagttttattcactt

SEQ ID NO: 166968 - DNA, 20 bp, Homo sapiens
  source 1..20: mol_type = genomic DNA
ttttgagttttattcacttt

SEQ ID NO: 166969 - DNA, 20 bp, Homo sapiens
  source 1..20: mol_type = genomic DNA
tttgagttttattcactttc

SEQ ID NO: 166970 - DNA, 20 bp, Homo sapiens
  source 1..20: mol_type = genomic DNA
ttgagttttattcactttca

SEQ ID NO: 166971 - DNA, 20 bp, Homo sapiens
  source 1..20: mol_type = genomic DNA
tgagttttattcactttcac

SEQ ID NO: 166972 - DNA, 20 bp, Homo sapiens
  source 1..20: mol_type = genomic DNA
gagttttattcactttcact

SEQ ID NO: 166973 - DNA, 20 bp, Homo sapiens
  source 1..20: mol_type = genomic DNA
agttttattcactttcactt

SEQ ID NO: 166974 - DNA, 20 bp, Homo sapiens
  source 1..20: mol_type = genomic DNA
gttttattcactttcacttt

SEQ ID NO: 166975 - DNA, 20 bp, Homo sapiens
  source 1..20: mol_type = genomic DNA
ttttattcactttcactttc

SEQ ID NO: 166976 - DNA, 20 bp, Homo sapiens
  source 1..20: mol_type = genomic DNA
tttattcactttcactttcc

SEQ ID NO: 166977 - DNA, 20 bp, Homo sapiens
  source 1..20: mol_type = genomic DNA
ttattcactttcactttcct

SEQ ID NO: 166978 - DNA, 20 bp, Homo sapiens
  source 1..20: mol_type = genomic DNA
tattcactttcactttcctt

SEQ ID NO: 166979 - DNA, 20 bp, Homo sapiens
  source 1..20: mol_type = genomic DNA
attcactttcactttccttt

SEQ ID NO: 166980 - DNA, 20 bp, Homo sapiens
  source 1..20: mol_type = genomic DNA
ttcactttcactttcctttt

SEQ ID NO: 166981 - DNA, 20 bp, Homo sapiens
  source 1..20: mol_type = genomic DNA
tcactttcactttccttttt

SEQ ID NO: 166982 - DNA, 20 bp, Homo sapiens
  source 1..20: mol_type = genomic DNA
cactttcactttcctttttt

SEQ ID NO: 166983 - DNA, 20 bp, Homo sapiens
  source 1..20: mol_type = genomic DNA
actttcactttccttttttt

SEQ ID NO: 166984 - DNA, 20 bp, Homo sapiens
  source 1..20: mol_type = genomic DNA
ctttcactttcctttttttc

SEQ ID NO: 166985 - DNA, 20 bp, Homo sapiens
  source 1..20: mol_type = genomic DNA
tttcactttcctttttttcc

SEQ ID NO: 166986 - DNA, 20 bp, Homo sapiens
  source 1..20: mol_type = genomic DNA
ttcactttcctttttttcca

SEQ ID NO: 166987 - DNA, 20 bp, Homo sapiens
  source 1..20: mol_type = genomic DNA
tcactttcctttttttccaa

SEQ ID NO: 166988 - DNA, 20 bp, Homo sapiens
  source 1..20: mol_type = genomic DNA
cactttcctttttttccaaa

SEQ ID NO: 166989 - DNA, 20 bp, Homo sapiens
  source 1..20: mol_type = genomic DNA
actttcctttttttccaaag

SEQ ID NO: 166990 - DNA, 20 bp, Homo sapiens
  source 1..20: mol_type = genomic DNA
ctttcctttttttccaaagc

SEQ ID NO: 166991 - DNA, 20 bp, Homo sapiens
  source 1..20: mol_type = genomic DNA
tttcctttttttccaaagca

SEQ ID NO: 166992 - DNA, 20 bp, Homo sapiens
  source 1..20: mol_type = genomic DNA
ttcctttttttccaaagcaa

SEQ ID NO: 166993 - DNA, 20 bp, Homo sapiens
  source 1..20: mol_type = genomic DNA
tcctttttttccaaagcaat

SEQ ID NO: 166994 - DNA, 20 bp, Homo sapiens
  source 1..20: mol_type = genomic DNA
cctttttttccaaagcaatt

SEQ ID NO: 166995 - DNA, 20 bp, Homo sapiens
  source 1..20: mol_type = genomic DNA
ctttttttccaaagcaatta

SEQ ID NO: 166996 - DNA, 20 bp, Homo sapiens
  source 1..20: mol_type = genomic DNA
tttttttccaaagcaattaa

SEQ ID NO: 166997 - DNA, 20 bp, Homo sapiens
  source 1..20: mol_type = genomic DNA
ttttttccaaagcaattaaa

SEQ ID NO: 166998 - DNA, 20 bp, Homo sapiens
  source 1..20: mol_type = genomic DNA
tttttccaaagcaattaaaa

SEQ ID NO: 166999 - DNA, 20 bp, Homo sapiens
  source 1..20: mol_type = genomic DNA
ttttccaaagcaattaaaaa

SEQ ID NO: 167000 - DNA, 20 bp, Homo sapiens
  source 1..20: mol_type = genomic DNA
tttccaaagcaattaaaaaa

SEQ ID NO: 167001 - DNA, 20 bp, Homo sapiens
  source 1..20: mol_type = genomic DNA
ttccaaagcaattaaaaaaa

SEQ ID NO: 167002 - DNA, 20 bp, Homo sapiens
  source 1..20: mol_type = genomic DNA
tccaaagcaattaaaaaaac

SEQ ID NO: 167003 - DNA, 20 bp, Homo sapiens
  source 1..20: mol_type = genomic DNA
ccaaagcaattaaaaaaact

SEQ ID NO: 167004 - DNA, 20 bp, Homo sapiens
  source 1..20: mol_type = genomic DNA
caaagcaattaaaaaaactg

SEQ ID NO: 167005 - DNA, 20 bp, Homo sapiens
  source 1..20: mol_type = genomic DNA
aaagcaattaaaaaaactgc

SEQ ID NO: 167006 - DNA, 20 bp, Homo sapiens
  source 1..20: mol_type = genomic DNA
aagcaattaaaaaaactgcc

SEQ ID NO: 167007 - DNA, 20 bp, Homo sapiens
  source 1..20: mol_type = genomic DNA
agcaattaaaaaaactgcca

SEQ ID NO: 167008 - DNA, 20 bp, Homo sapiens
  source 1..20: mol_type = genomic DNA
gcaattaaaaaaactgccaa

SEQ ID NO: 167009 - DNA, 20 bp, Homo sapiens
  source 1..20: mol_type = genomic DNA
caattaaaaaaactgccaaa

SEQ ID NO: 167010 - DNA, 20 bp, Homo sapiens
  source 1..20: mol_type = genomic DNA
aattaaaaaaactgccaaag

SEQ ID NO: 167011 - DNA, 20 bp, Homo sapiens
  source 1..20: mol_type = genomic DNA
attaaaaaaactgccaaagt

SEQ ID NO: 167012 - DNA, 20 bp, Homo sapiens
  source 1..20: mol_type = genomic DNA
ttaaaaaaactgccaaagta

SEQ ID NO: 167013 - DNA, 20 bp, Homo sapiens
  source 1..20: mol_type = genomic DNA
taaaaaaactgccaaagtaa

SEQ ID NO: 167014 - DNA, 20 bp, Homo sapiens
  source 1..20: mol_type = genomic DNA
aaaaaaactgccaaagtaag

SEQ ID NO: 167015 - DNA, 20 bp, Homo sapiens
  source 1..20: mol_type = genomic DNA
aaaaaactgccaaagtaaga

SEQ ID NO: 167016 - DNA, 20 bp, Homo sapiens
  source 1..20: mol_type = genomic DNA
aaaaactgccaaagtaagag

SEQ ID NO: 167017 - DNA, 20 bp, Homo sapiens
  source 1..20: mol_type = genomic DNA
aaaactgccaaagtaagagt

SEQ ID NO: 167018 - DNA, 20 bp, Homo sapiens
  source 1..20: mol_type = genomic DNA
aaactgccaaagtaagagtg

SEQ ID NO: 167019 - DNA, 20 bp, Homo sapiens
  source 1..20: mol_type = genomic DNA
aactgccaaagtaagagtga

SEQ ID NO: 167020 - DNA, 20 bp, Homo sapiens
  source 1..20: mol_type = genomic DNA
actgccaaagtaagagtgac

SEQ ID NO: 167021 - DNA, 20 bp, Homo sapiens
  source 1..20: mol_type = genomic DNA
ctgccaaagtaagagtgact

SEQ ID NO: 167022 - DNA, 20 bp, Homo sapiens
  source 1..20: mol_type = genomic DNA
tgccaaagtaagagtgactg

SEQ ID NO: 167023 - DNA, 20 bp, Homo sapiens
  source 1..20: mol_type = genomic DNA
gccaaagtaagagtgactgc

SEQ ID NO: 167024 - DNA, 20 bp, Homo sapiens
  source 1..20: mol_type = genomic DNA
ccaaagtaagagtgactgcg

SEQ ID NO: 167025 - DNA, 20 bp, Homo sapiens
  source 1..20: mol_type = genomic DNA
caaagtaagagtgactgcgg

SEQ ID NO: 167026 - DNA, 20 bp, Homo sapiens
  source 1..20: mol_type = genomic DNA
aaagtaagagtgactgcgga

SEQ ID NO: 167027 - DNA, 20 bp, Homo sapiens
  source 1..20: mol_type = genomic DNA
aagtaagagtgactgcggaa

SEQ ID NO: 167028 - DNA, 20 bp, Homo sapiens
  source 1..20: mol_type = genomic DNA
agtaagagtgactgcggaac

SEQ ID NO: 167029 - DNA, 20 bp, Homo sapiens
  source 1..20: mol_type = genomic DNA
gtaagagtgactgcggaact

SEQ ID NO: 167030 - DNA, 20 bp, Homo sapiens
  source 1..20: mol_type = genomic DNA
taagagtgactgcggaacta

SEQ ID NO: 167031 - DNA, 20 bp, Homo sapiens
  source 1..20: mol_type = genomic DNA
aagagtgactgcggaactaa

SEQ ID NO: 167032 - DNA, 20 bp, Homo sapiens
  source 1..20: mol_type = genomic DNA
agagtgactgcggaactaag

SEQ ID NO: 167033 - DNA, 20 bp, Homo sapiens
  source 1..20: mol_type = genomic DNA
gagtgactgcggaactaagg

SEQ ID NO: 167034 - DNA, 20 bp, Homo sapiens
  source 1..20: mol_type = genomic DNA
agtgactgcggaactaaggt

SEQ ID NO: 167035 - DNA, 20 bp, Homo sapiens
  source 1..20: mol_type = genomic DNA
gtgactgcggaactaaggtt

SEQ ID NO: 167036 - DNA, 20 bp, Homo sapiens
  source 1..20: mol_type = genomic DNA
tgactgcggaactaaggtta

SEQ ID NO: 167037 - DNA, 20 bp, Homo sapiens
  source 1..20: mol_type = genomic DNA
gactgcggaactaaggttac

SEQ ID NO: 167038 - DNA, 20 bp, Homo sapiens
  source 1..20: mol_type = genomic DNA
actgcggaactaaggttact

SEQ ID NO: 167039 - DNA, 20 bp, Homo sapiens
  source 1..20: mol_type = genomic DNA
ctgcggaactaaggttactg

SEQ ID NO: 167040 - DNA, 20 bp, Homo sapiens
  source 1..20: mol_type = genomic DNA
tgcggaactaaggttactgt

SEQ ID NO: 167041 - DNA, 20 bp, Homo sapiens
  source 1..20: mol_type = genomic DNA
gcggaactaaggttactgta

SEQ ID NO: 167042 - DNA, 20 bp, Homo sapiens
  source 1..20: mol_type = genomic DNA
cggaactaaggttactgtaa

SEQ ID NO: 167043 - DNA, 20 bp, Homo sapiens
  source 1..20: mol_type = genomic DNA
ggaactaaggttactgtaac

SEQ ID NO: 167044 - DNA, 20 bp, Homo sapiens
  source 1..20: mol_type = genomic DNA
gaactaaggttactgtaact

SEQ ID NO: 167045 - DNA, 20 bp, Homo sapiens
  source 1..20: mol_type = genomic DNA
aactaaggttactgtaactt

SEQ ID NO: 167046 - DNA, 20 bp, Homo sapiens
  source 1..20: mol_type = genomic DNA
actaaggttactgtaactta

SEQ ID NO: 167047 - DNA, 20 bp, Homo sapiens
  source 1..20: mol_type = genomic DNA
ctaaggttactgtaacttac

SEQ ID NO: 167048 - DNA, 20 bp, Homo sapiens
  source 1..20: mol_type = genomic DNA
taaggttactgtaacttacc

SEQ ID NO: 167049 - DNA, 20 bp, Homo sapiens
  source 1..20: mol_type = genomic DNA
aaggttactgtaacttacca

SEQ ID NO: 167050 - DNA, 20 bp, Homo sapiens
  source 1..20: mol_type = genomic DNA
aggttactgtaacttaccat

SEQ ID NO: 167051 - DNA, 20 bp, Homo sapiens
  source 1..20: mol_type = genomic DNA
ggttactgtaacttaccatg

SEQ ID NO: 167052 - DNA, 20 bp, Homo sapiens
  source 1..20: mol_type = genomic DNA
gttactgtaacttaccatgg

SEQ ID NO: 167053 - DNA, 20 bp, Homo sapiens
  source 1..20: mol_type = genomic DNA
ttactgtaacttaccatgga

SEQ ID NO: 167054 - DNA, 20 bp, Homo sapiens
  source 1..20: mol_type = genomic DNA
tactgtaacttaccatggag

SEQ ID NO: 167055 - DNA, 20 bp, Homo sapiens
  source 1..20: mol_type = genomic DNA
actgtaacttaccatggagg

SEQ ID NO: 167056 - DNA, 20 bp, Homo sapiens
  source 1..20: mol_type = genomic DNA
ctgtaacttaccatggagga

SEQ ID NO: 167057 - DNA, 20 bp, Homo sapiens
  source 1..20: mol_type = genomic DNA
tgtaacttaccatggaggat

SEQ ID NO: 167058 - DNA, 20 bp, Homo sapiens
  source 1..20: mol_type = genomic DNA
gtaacttaccatggaggatt

SEQ ID NO: 167059 - DNA, 20 bp, Homo sapiens
  source 1..20: mol_type = genomic DNA
taacttaccatggaggatta

SEQ ID NO: 167060 - DNA, 20 bp, Homo sapiens
  source 1..20: mol_type = genomic DNA
aacttaccatggaggattaa

SEQ ID NO: 167061 - DNA, 20 bp, Homo sapiens
  source 1..20: mol_type = genomic DNA
acttaccatggaggattaag

SEQ ID NO: 167062 - DNA, 20 bp, Homo sapiens
  source 1..20: mol_type = genomic DNA
cttaccatggaggattaagg

SEQ ID NO: 167063 - DNA, 20 bp, Homo sapiens
  source 1..20: mol_type = genomic DNA
ttaccatggaggattaaggg

SEQ ID NO: 167064 - DNA, 20 bp, Homo sapiens
  source 1..20: mol_type = genomic DNA
taccatggaggattaagggt

SEQ ID NO: 167065 - DNA, 20 bp, Homo sapiens
  source 1..20: mol_type = genomic DNA
accatggaggattaagggta

SEQ ID NO: 167066 - DNA, 20 bp, Homo sapiens
  source 1..20: mol_type = genomic DNA
ccatggaggattaagggtag

SEQ ID NO: 167067 - DNA, 20 bp, Homo sapiens
  source 1..20: mol_type = genomic DNA
catggaggattaagggtagc

SEQ ID NO: 167068 - DNA, 20 bp, Homo sapiens
  source 1..20: mol_type = genomic DNA
atggaggattaagggtagcg

SEQ ID NO: 167069 - DNA, 20 bp, Homo sapiens
  source 1..20: mol_type = genomic DNA
tggaggattaagggtagcgt

SEQ ID NO: 167070 - DNA, 20 bp, Homo sapiens
  source 1..20: mol_type = genomic DNA
ggaggattaagggtagcgtg

SEQ ID NO: 167071 - DNA, 20 bp, Homo sapiens
  source 1..20: mol_type = genomic DNA
gaggattaagggtagcgtgt

SEQ ID NO: 167072 - DNA, 20 bp, Homo sapiens
  source 1..20: mol_type = genomic DNA
aggattaagggtagcgtgtg

SEQ ID NO: 167073 - DNA, 20 bp, Homo sapiens
  source 1..20: mol_type = genomic DNA
ggattaagggtagcgtgtgg

SEQ ID NO: 167074 - DNA, 20 bp, Homo sapiens
  source 1..20: mol_type = genomic DNA
gattaagggtagcgtgtggt

SEQ ID NO: 167075 - DNA, 20 bp, Homo sapiens
  source 1..20: mol_type = genomic DNA
attaagggtagcgtgtggtg

SEQ ID NO: 167076 - DNA, 20 bp, Homo sapiens
  source 1..20: mol_type = genomic DNA
ttaagggtagcgtgtggtgg

SEQ ID NO: 167077 - DNA, 20 bp, Homo sapiens
  source 1..20: mol_type = genomic DNA
taagggtagcgtgtggtggt

SEQ ID NO: 167078 - DNA, 20 bp, Homo sapiens
  source 1..20: mol_type = genomic DNA
aagggtagcgtgtggtggtc

SEQ ID NO: 167079 - DNA, 20 bp, Homo sapiens
  source 1..20: mol_type = genomic DNA
agggtagcgtgtggtggtct

SEQ ID NO: 167080 - DNA, 20 bp, Homo sapiens
  source 1..20: mol_type = genomic DNA
gggtagcgtgtggtggtcta

SEQ ID NO: 167081 - DNA, 20 bp, Homo sapiens
  source 1..20: mol_type = genomic DNA
ggtagcgtgtggtggtctac

SEQ ID NO: 167082 - DNA, 20 bp, Homo sapiens
  source 1..20: mol_type = genomic DNA
gtagcgtgtggtggtctaca

SEQ ID NO: 167083 - DNA, 20 bp, Homo sapiens
  source 1..20: mol_type = genomic DNA
tagcgtgtggtggtctacaa

SEQ ID NO: 167084 - DNA, 20 bp, Homo sapiens
  source 1..20: mol_type = genomic DNA
agcgtgtggtggtctacaac

SEQ ID NO: 167085 - DNA, 20 bp, Homo sapiens
  source 1..20: mol_type = genomic DNA
gcgtgtggtggtctacaaca

SEQ ID NO: 167086 - DNA, 20 bp, Homo sapiens
  source 1..20: mol_type = genomic DNA
cgtgtggtggtctacaacat

SEQ ID NO: 167087 - DNA, 20 bp, Homo sapiens
  source 1..20: mol_type = genomic DNA
gtgtggtggtctacaacata

SEQ ID NO: 167088 - DNA, 20 bp, Homo sapiens
  source 1..20: mol_type = genomic DNA
tgtggtggtctacaacatag

SEQ ID NO: 167089 - DNA, 20 bp, Homo sapiens
  source 1..20: mol_type = genomic DNA
gtggtggtctacaacatagt

SEQ ID NO: 167090 - DNA, 20 bp, Homo sapiens
  source 1..20: mol_type = genomic DNA
tggtggtctacaacatagtt

SEQ ID NO: 167091 - DNA, 20 bp, Homo sapiens
  source 1..20: mol_type = genomic DNA
ggtggtctacaacatagtta

SEQ ID NO: 167092 - DNA, 20 bp, Homo sapiens
  source 1..20: mol_type = genomic DNA
gtggtctacaacatagttat

SEQ ID NO: 167093 - DNA, 20 bp, Homo sapiens
  source 1..20: mol_type = genomic DNA
tggtctacaacatagttatt

SEQ ID NO: 167094 - DNA, 20 bp, Homo sapiens
  source 1..20: mol_type = genomic DNA
ggtctacaacatagttattt

SEQ ID NO: 167095 - DNA, 20 bp, Homo sapiens
  source 1..20: mol_type = genomic DNA
gtctacaacatagttatttg

SEQ ID NO: 167096 - DNA, 20 bp, Homo sapiens
  source 1..20: mol_type = genomic DNA
tctacaacatagttatttgg

SEQ ID NO: 167097 - DNA, 20 bp, Homo sapiens
  source 1..20: mol_type = genomic DNA
ctacaacatagttatttggg

SEQ ID NO: 167098 - DNA, 20 bp, Homo sapiens
  source 1..20: mol_type = genomic DNA
tacaacatagttatttgggt

SEQ ID NO: 167099 - DNA, 20 bp, Homo sapiens
  source 1..20: mol_type = genomic DNA
acaacatagttatttgggtt

SEQ ID NO: 167100 - DNA, 20 bp, Homo sapiens
  source 1..20: mol_type = genomic DNA
caacatagttatttgggttt

SEQ ID NO: 167101 - DNA, 20 bp, Homo sapiens
  source 1..20: mol_type = genomic DNA
aacatagttatttgggtttt

SEQ ID NO: 167102 - DNA, 20 bp, Homo sapiens
  source 1..20: mol_type = genomic DNA
acatagttatttgggtttta

SEQ ID NO: 167103 - DNA, 20 bp, Homo sapiens
  source 1..20: mol_type = genomic DNA
catagttatttgggttttag

SEQ ID NO: 167104 - DNA, 20 bp, Homo sapiens
  source 1..20: mol_type = genomic DNA
atagttatttgggttttagt

SEQ ID NO: 167105 - DNA, 20 bp, Homo sapiens
  source 1..20: mol_type = genomic DNA
tagttatttgggttttagta

SEQ ID NO: 167106 - DNA, 20 bp, Homo sapiens
  source 1..20: mol_type = genomic DNA
agttatttgggttttagtat

SEQ ID NO: 167107 - DNA, 20 bp, Homo sapiens
  source 1..20: mol_type = genomic DNA
gttatttgggttttagtatt

SEQ ID NO: 167108 - DNA, 20 bp, Homo sapiens
  source 1..20: mol_type = genomic DNA
ttatttgggttttagtattt

SEQ ID NO: 167109 - DNA, 20 bp, Homo sapiens
  source 1..20: mol_type = genomic DNA
tatttgggttttagtatttc

SEQ ID NO: 167110 - DNA, 20 bp, Homo sapiens
  source 1..20: mol_type = genomic DNA
atttgggttttagtatttca

SEQ ID NO: 167111 - DNA, 20 bp, Homo sapiens
  source 1..20: mol_type = genomic DNA
tttgggttttagtatttcat

SEQ ID NO: 167112 - DNA, 20 bp, Homo sapiens
  source 1..20: mol_type = genomic DNA
ttgggttttagtatttcatt

SEQ ID NO: 167113 - DNA, 20 bp, Homo sapiens
  source 1..20: mol_type = genomic DNA
tgggttttagtatttcattt

SEQ ID NO: 167114 - DNA, 20 bp, Homo sapiens
  source 1..20: mol_type = genomic DNA
gggttttagtatttcattta

SEQ ID NO: 167115 - DNA, 20 bp, Homo sapiens
  source 1..20: mol_type = genomic DNA
ggttttagtatttcatttag

SEQ ID NO: 167116 - DNA, 20 bp, Homo sapiens
  source 1..20: mol_type = genomic DNA
gttttagtatttcatttaga

SEQ ID NO: 167117 - DNA, 20 bp, Homo sapiens
  source 1..20: mol_type = genomic DNA
ttttagtatttcatttagac

SEQ ID NO: 167118 - DNA, 20 bp, Homo sapiens
  source 1..20: mol_type = genomic DNA
tttagtatttcatttagaca

SEQ ID NO: 167119 - DNA, 20 bp, Homo sapiens
  source 1..20: mol_type = genomic DNA
ttagtatttcatttagacag

SEQ ID NO: 167120 - DNA, 20 bp, Homo sapiens
  source 1..20: mol_type = genomic DNA
tagtatttcatttagacagc

SEQ ID NO: 167121 - DNA, 20 bp, Homo sapiens
  source 1..20: mol_type = genomic DNA
agtatttcatttagacagca

SEQ ID NO: 167122 - DNA, 20 bp, Homo sapiens
  source 1..20: mol_type = genomic DNA
gtatttcatttagacagcaa

SEQ ID NO: 167123 - DNA, 20 bp, Homo sapiens
  source 1..20: mol_type = genomic DNA
tatttcatttagacagcaac

SEQ ID NO: 167124 - DNA, 20 bp, Homo sapiens
  source 1..20: mol_type = genomic DNA
atttcatttagacagcaaca

SEQ ID NO: 167125 - DNA, 20 bp, Homo sapiens
  source 1..20: mol_type = genomic DNA
tttcatttagacagcaacac

SEQ ID NO: 167126 - DNA, 20 bp, Homo sapiens
  source 1..20: mol_type = genomic DNA
ttcatttagacagcaacact

SEQ ID NO: 167127 - DNA, 20 bp, Homo sapiens
  source 1..20: mol_type = genomic DNA
tcatttagacagcaacactt

SEQ ID NO: 167128 - DNA, 20 bp, Homo sapiens
  source 1..20: mol_type = genomic DNA
catttagacagcaacactta

SEQ ID NO: 167129 - DNA, 20 bp, Homo sapiens
  source 1..20: mol_type = genomic DNA
atttagacagcaacacttac

SEQ ID NO: 167130 - DNA, 20 bp, Homo sapiens
  source 1..20: mol_type = genomic DNA
tttagacagcaacacttacc

SEQ ID NO: 167131 - DNA, 20 bp, Homo sapiens
  source 1..20: mol_type = genomic DNA
ttagacagcaacacttacct

SEQ ID NO: 167132 - DNA, 20 bp, Homo sapiens
  source 1..20: mol_type = genomic DNA
tagacagcaacacttaccta

SEQ ID NO: 167133 - DNA, 20 bp, Homo sapiens
  source 1..20: mol_type = genomic DNA
agacagcaacacttacctaa

SEQ ID NO: 167134 - DNA, 20 bp, Homo sapiens
  source 1..20: mol_type = genomic DNA
gacagcaacacttacctaat

SEQ ID NO: 167135 - DNA, 20 bp, Homo sapiens
  source 1..20: mol_type = genomic DNA
acagcaacacttacctaatg

SEQ ID NO: 167136 - DNA, 20 bp, Homo sapiens
  source 1..20: mol_type = genomic DNA
cagcaacacttacctaatgt

SEQ ID NO: 167137 - DNA, 20 bp, Homo sapiens
  source 1..20: mol_type = genomic DNA
agcaacacttacctaatgtt

SEQ ID NO: 167138 - DNA, 20 bp, Homo sapiens
  source 1..20: mol_type = genomic DNA
gcaacacttacctaatgttt

SEQ ID NO: 167139 - DNA, 20 bp, Homo sapiens
  source 1..20: mol_type = genomic DNA
caacacttacctaatgttta

SEQ ID NO: 167140 - DNA, 20 bp, Homo sapiens
  source 1..20: mol_type = genomic DNA
aacacttacctaatgtttaa

SEQ ID NO: 167141 - DNA, 20 bp, Homo sapiens
  source 1..20: mol_type = genomic DNA
acacttacctaatgtttaaa

SEQ ID NO: 167142 - DNA, 20 bp, Homo sapiens
  source 1..20: mol_type = genomic DNA
cacttacctaatgtttaaag

SEQ ID NO: 167143 - DNA, 20 bp, Homo sapiens
  source 1..20: mol_type = genomic DNA
acttacctaatgtttaaagg

SEQ ID NO: 167144 - DNA, 20 bp, Homo sapiens
  source 1..20: mol_type = genomic DNA
cttacctaatgtttaaaggt

SEQ ID NO: 167145 - DNA, 20 bp, Homo sapiens
  source 1..20: mol_type = genomic DNA
ttacctaatgtttaaaggta

SEQ ID NO: 167146 - DNA, 20 bp, Homo sapiens
  source 1..20: mol_type = genomic DNA
tacctaatgtttaaaggtaa

SEQ ID NO: 167147 - DNA, 20 bp, Homo sapiens
  source 1..20: mol_type = genomic DNA
acctaatgtttaaaggtaat

SEQ ID NO: 167148 - DNA, 20 bp, Homo sapiens
  source 1..20: mol_type = genomic DNA
cctaatgtttaaaggtaatg

SEQ ID NO: 167149 - DNA, 20 bp, Homo sapiens
  source 1..20: mol_type = genomic DNA
ctaatgtttaaaggtaatgt

SEQ ID NO: 167150 - DNA, 20 bp, Homo sapiens
  source 1..20: mol_type = genomic DNA
taatgtttaaaggtaatgtc

SEQ ID NO: 167151 - DNA, 20 bp, Homo sapiens
  source 1..20: mol_type = genomic DNA
aatgtttaaaggtaatgtct

SEQ ID NO: 167152 - DNA, 20 bp, Homo sapiens
  source 1..20: mol_type = genomic DNA
atgtttaaaggtaatgtctt

SEQ ID NO: 167153 - DNA, 20 bp, Homo sapiens
  source 1..20: mol_type = genomic DNA
tgtttaaaggtaatgtcttt

SEQ ID NO: 167154 - DNA, 20 bp, Homo sapiens
  source 1..20: mol_type = genomic DNA
gtttaaaggtaatgtctttg

SEQ ID NO: 167155 - DNA, 20 bp, Homo sapiens
  source 1..20: mol_type = genomic DNA
tttaaaggtaatgtctttgc

SEQ ID NO: 167156 - DNA, 20 bp, Homo sapiens
  source 1..20: mol_type = genomic DNA
ttaaaggtaatgtctttgca

SEQ ID NO: 167157 - DNA, 20 bp, Homo sapiens
  source 1..20: mol_type = genomic DNA
taaaggtaatgtctttgcaa

SEQ ID NO: 167158 - DNA, 20 bp, Homo sapiens
  source 1..20: mol_type = genomic DNA
aaaggtaatgtctttgcaac

SEQ ID NO: 167159 - DNA, 20 bp, Homo sapiens
  source 1..20: mol_type = genomic DNA
aaggtaatgtctttgcaaca

SEQ ID NO: 167160 - DNA, 20 bp, Homo sapiens
  source 1..20: mol_type = genomic DNA
aggtaatgtctttgcaacac

SEQ ID NO: 167161 - DNA, 20 bp, Homo sapiens
  source 1..20: mol_type = genomic DNA
ggtaatgtctttgcaacacc

SEQ ID NO: 167162 - DNA, 20 bp, Homo sapiens
  source 1..20: mol_type = genomic DNA
gtaatgtctttgcaacacca

SEQ ID NO: 167163 - DNA, 20 bp, Homo sapiens
  source 1..20: mol_type = genomic DNA
taatgtctttgcaacaccaa

SEQ ID NO: 167164 - DNA, 20 bp, Homo sapiens
  source 1..20: mol_type = genomic DNA
aatgtctttgcaacaccaag

SEQ ID NO: 167165 - DNA, 20 bp, Homo sapiens
  source 1..20: mol_type = genomic DNA
atgtctttgcaacaccaaga

SEQ ID NO: 167166 - DNA, 20 bp, Homo sapiens
  source 1..20: mol_type = genomic DNA
tgtctttgcaacaccaagaa

SEQ ID NO: 167167 - DNA, 20 bp, Homo sapiens
  source 1..20: mol_type = genomic DNA
gtctttgcaacaccaagaaa

SEQ ID NO: 167168 - DNA, 20 bp, Homo sapiens
  source 1..20: mol_type = genomic DNA
tctttgcaacaccaagaaaa

SEQ ID NO: 167169 - DNA, 20 bp, Homo sapiens
  source 1..20: mol_type = genomic DNA
ctttgcaacaccaagaaaaa

SEQ ID NO: 167170 - DNA, 20 bp, Homo sapiens
  source 1..20: mol_type = genomic DNA
tttgcaacaccaagaaaaag

SEQ ID NO: 167171 - DNA, 20 bp, Homo sapiens
  source 1..20: mol_type = genomic DNA
ttgcaacaccaagaaaaagc

SEQ ID NO: 167172 - DNA, 20 bp, Homo sapiens
  source 1..20: mol_type = genomic DNA
tgcaacaccaagaaaaagct

SEQ ID NO: 167173 - DNA, 20 bp, Homo sapiens
  source 1..20: mol_type = genomic DNA
gcaacaccaagaaaaagctt

SEQ ID NO: 167174 - DNA, 20 bp, Homo sapiens
  source 1..20: mol_type = genomic DNA
caacaccaagaaaaagcttt

SEQ ID NO: 167175 - DNA, 20 bp, Homo sapiens
  source 1..20: mol_type = genomic DNA
aacaccaagaaaaagctttg

SEQ ID NO: 167176 - DNA, 20 bp, Homo sapiens
  source 1..20: mol_type = genomic DNA
acaccaagaaaaagctttga

SEQ ID NO: 167177 - DNA, 20 bp, Homo sapiens
  source 1..20: mol_type = genomic DNA
caccaagaaaaagctttgag

SEQ ID NO: 167178 - DNA, 20 bp, Homo sapiens
  source 1..20: mol_type = genomic DNA
accaagaaaaagctttgagt

SEQ ID NO: 167179 - DNA, 20 bp, Homo sapiens
  source 1..20: mol_type = genomic DNA
ccaagaaaaagctttgagta

SEQ ID NO: 167180 - DNA, 20 bp, Homo sapiens
  source 1..20: mol_type = genomic DNA
caagaaaaagctttgagtag

SEQ ID NO: 167181 - DNA, 20 bp, Homo sapiens
  source 1..20: mol_type = genomic DNA
aagaaaaagctttgagtagt

SEQ ID NO: 167182 - DNA, 20 bp, Homo sapiens
  source 1..20: mol_type = genomic DNA
agaaaaagctttgagtagta

SEQ ID NO: 167183 - DNA, 20 bp, Homo sapiens
  source 1..20: mol_type = genomic DNA
gaaaaagctttgagtagtag

SEQ ID NO: 167184 - DNA, 20 bp, Homo sapiens
  source 1..20: mol_type = genomic DNA
aaaaagctttgagtagtagt

SEQ ID NO: 167185 - DNA, 20 bp, Homo sapiens
  source 1..20: mol_type = genomic DNA
aaaagctttgagtagtagtt

SEQ ID NO: 167186 - DNA, 20 bp, Homo sapiens
  source 1..20: mol_type = genomic DNA
aaagctttgagtagtagttt

SEQ ID NO: 167187 - DNA, 20 bp, Homo sapiens
  source 1..20: mol_type = genomic DNA
aagctttgagtagtagtttc

SEQ ID NO: 167188 - DNA, 20 bp, Homo sapiens
  source 1..20: mol_type = genomic DNA
agctttgagtagtagtttct

SEQ ID NO: 167189 - DNA, 20 bp, Homo sapiens
  source 1..20: mol_type = genomic DNA
gctttgagtagtagtttcta

SEQ ID NO: 167190 - DNA, 20 bp, Homo sapiens
  source 1..20: mol_type = genomic DNA
ctttgagtagtagtttctac

SEQ ID NO: 167191 - DNA, 20 bp, Homo sapiens
  source 1..20: mol_type = genomic DNA
tttgagtagtagtttctact

SEQ ID NO: 167192 - DNA, 20 bp, Homo sapiens
  source 1..20: mol_type = genomic DNA
ttgagtagtagtttctactt

SEQ ID NO: 167193 - DNA, 20 bp, Homo sapiens
  source 1..20: mol_type = genomic DNA
tgagtagtagtttctacttt

SEQ ID NO: 167194 - DNA, 20 bp, Homo sapiens
  source 1..20: mol_type = genomic DNA
gagtagtagtttctactttt

SEQ ID NO: 167195 - DNA, 20 bp, Homo sapiens
  source 1..20: mol_type = genomic DNA
agtagtagtttctactttta

SEQ ID NO: 167196 - DNA, 20 bp, Homo sapiens
  source 1..20: mol_type = genomic DNA
gtagtagtttctacttttaa

SEQ ID NO: 167197 - DNA, 20 bp, Homo sapiens
  source 1..20: mol_type = genomic DNA
tagtagtttctacttttaaa

SEQ ID NO: 167198 - DNA, 20 bp, Homo sapiens
  source 1..20: mol_type = genomic DNA
agtagtttctacttttaaac

SEQ ID NO: 167199 - DNA, 20 bp, Homo sapiens
  source 1..20: mol_type = genomic DNA
gtagtttctacttttaaact

SEQ ID NO: 167200 - DNA, 20 bp, Homo sapiens
  source 1..20: mol_type = genomic DNA
tagtttctacttttaaacta

SEQ ID NO: 167201 - DNA, 20 bp, Homo sapiens
  source 1..20: mol_type = genomic DNA
agtttctacttttaaactac

SEQ ID NO: 167202 - DNA, 20 bp, Homo sapiens
  source 1..20: mol_type = genomic DNA
gtttctacttttaaactact

SEQ ID NO: 167203 - DNA, 20 bp, Homo sapiens
  source 1..20: mol_type = genomic DNA
tttctacttttaaactacta

SEQ ID NO: 167204 - DNA, 20 bp, Homo sapiens
  source 1..20: mol_type = genomic DNA
ttctacttttaaactactaa

SEQ ID NO: 167205 - DNA, 20 bp, Homo sapiens
  source 1..20: mol_type = genomic DNA
tctacttttaaactactaaa

SEQ ID NO: 167206 - DNA, 20 bp, Homo sapiens
  source 1..20: mol_type = genomic DNA
ctacttttaaactactaaat

SEQ ID NO: 167207 - DNA, 20 bp, Homo sapiens
  source 1..20: mol_type = genomic DNA
tacttttaaactactaaata

SEQ ID NO: 167208 - DNA, 20 bp, Homo sapiens
  source 1..20: mol_type = genomic DNA
acttttaaactactaaatat

SEQ ID NO: 167209 - DNA, 20 bp, Homo sapiens
  source 1..20: mol_type = genomic DNA
cttttaaactactaaatatt

SEQ ID NO: 167210 - DNA, 20 bp, Homo sapiens
  source 1..20: mol_type = genomic DNA
ttttaaactactaaatatta

SEQ ID NO: 167211 - DNA, 20 bp, Homo sapiens
  source 1..20: mol_type = genomic DNA
tttaaactactaaatattag

SEQ ID NO: 167212 - DNA, 20 bp, Homo sapiens
  source 1..20: mol_type = genomic DNA
ttaaactactaaatattagt

SEQ ID NO: 167213 - DNA, 20 bp, Homo sapiens
  source 1..20: mol_type = genomic DNA
taaactactaaatattagta

SEQ ID NO: 167214 - DNA, 20 bp, Homo sapiens
  source 1..20: mol_type = genomic DNA
aaactactaaatattagtat

SEQ ID NO: 167215 - DNA, 20 bp, Homo sapiens
  source 1..20: mol_type = genomic DNA
aactactaaatattagtata

SEQ ID NO: 167216 - DNA, 20 bp, Homo sapiens
  source 1..20: mol_type = genomic DNA
actactaaatattagtatat

SEQ ID NO: 167217 - DNA, 20 bp, Homo sapiens
  source 1..20: mol_type = genomic DNA
ctactaaatattagtatatc

SEQ ID NO: 167218 - DNA, 20 bp, Homo sapiens
  source 1..20: mol_type = genomic DNA
tactaaatattagtatatct

SEQ ID NO: 167219 - DNA, 20 bp, Homo sapiens
  source 1..20: mol_type = genomic DNA
actaaatattagtatatctc

SEQ ID NO: 167220 - DNA, 20 bp, Homo sapiens
  source 1..20: mol_type = genomic DNA
ctaaatattagtatatctct

SEQ ID NO: 167221 - DNA, 20 bp, Homo sapiens
  source 1..20: mol_type = genomic DNA
taaatattagtatatctctc

SEQ ID NO: 167222 - DNA, 20 bp, Homo sapiens
  source 1..20: mol_type = genomic DNA
aaatattagtatatctctct

SEQ ID NO: 167223 - DNA, 20 bp, Homo sapiens
  source 1..20: mol_type = genomic DNA
aatattagtatatctctcta

SEQ ID NO: 167224 - DNA, 20 bp, Homo sapiens
  source 1..20: mol_type = genomic DNA
atattagtatatctctctac

SEQ ID NO: 167225 - DNA, 20 bp, Homo sapiens
  source 1..20: mol_type = genomic DNA
tattagtatatctctctact

SEQ ID NO: 167226 - DNA, 20 bp, Homo sapiens
  source 1..20: mol_type = genomic DNA
attagtatatctctctacta

SEQ ID NO: 167227 - DNA, 20 bp, Homo sapiens
  source 1..20: mol_type = genomic DNA
ttagtatatctctctactag

SEQ ID NO: 167228 - DNA, 20 bp, Homo sapiens
  source 1..20: mol_type = genomic DNA
tagtatatctctctactagg

SEQ ID NO: 167229 - DNA, 20 bp, Homo sapiens
  source 1..20: mol_type = genomic DNA
agtatatctctctactagga

SEQ ID NO: 167230 - DNA, 20 bp, Homo sapiens
  source 1..20: mol_type = genomic DNA
gtatatctctctactaggat

SEQ ID NO: 167231 - DNA, 20 bp, Homo sapiens
  source 1..20: mol_type = genomic DNA
tatatctctctactaggatt

SEQ ID NO: 167232 - DNA, 20 bp, Homo sapiens
  source 1..20: mol_type = genomic DNA
atatctctctactaggatta

SEQ ID NO: 167233 - DNA, 20 bp, Homo sapiens
  source 1..20: mol_type = genomic DNA
tatctctctactaggattaa

SEQ ID NO: 167234 - DNA, 20 bp, Homo sapiens
  source 1..20: mol_type = genomic DNA
atctctctactaggattaat

SEQ ID NO: 167235 - DNA, 20 bp, Homo sapiens
  source 1..20: mol_type = genomic DNA
tctctctactaggattaatg

SEQ ID NO: 167236 - DNA, 20 bp, Homo sapiens
  source 1..20: mol_type = genomic DNA
ctctctactaggattaatgt

SEQ ID NO: 167237 - DNA, 20 bp, Homo sapiens
  source 1..20: mol_type = genomic DNA
tctctactaggattaatgtt

SEQ ID NO: 167238 - DNA, 20 bp, Homo sapiens
  source 1..20: mol_type = genomic DNA
ctctactaggattaatgtta

SEQ ID NO: 167239 - DNA, 20 bp, Homo sapiens
  source 1..20: mol_type = genomic DNA
tctactaggattaatgttat

SEQ ID NO: 167240 - DNA, 20 bp, Homo sapiens
  source 1..20: mol_type = genomic DNA
ctactaggattaatgttatt

SEQ ID NO: 167241 - DNA, 20 bp, Homo sapiens
  source 1..20: mol_type = genomic DNA
tactaggattaatgttattt

SEQ ID NO: 167242 - DNA, 20 bp, Homo sapiens
  source 1..20: mol_type = genomic DNA
actaggattaatgttatttt

SEQ ID NO: 167243 - DNA, 20 bp, Homo sapiens
  source 1..20: mol_type = genomic DNA
ctaggattaatgttattttt

SEQ ID NO: 167244 - DNA, 20 bp, Homo sapiens
  source 1..20: mol_type = genomic DNA
taggattaatgttatttttc

SEQ ID NO: 167245 - DNA, 20 bp, Homo sapiens
  source 1..20: mol_type = genomic DNA
aggattaatgttatttttct

SEQ ID NO: 167246 - DNA, 20 bp, Homo sapiens
  source 1..20: mol_type = genomic DNA
ggattaatgttatttttcta

SEQ ID NO: 167247 - DNA, 20 bp, Homo sapiens
  source 1..20: mol_type = genomic DNA
gattaatgttatttttctaa

SEQ ID NO: 167248 - DNA, 20 bp, Homo sapiens
  source 1..20: mol_type = genomic DNA
attaatgttatttttctaat

SEQ ID NO: 167249 - DNA, 20 bp, Homo sapiens
  source 1..20: mol_type = genomic DNA
ttaatgttatttttctaata

SEQ ID NO: 167250 - DNA, 20 bp, Homo sapiens
  source 1..20: mol_type = genomic DNA
taatgttatttttctaatat

SEQ ID NO: 167251 - DNA, 20 bp, Homo sapiens
  source 1..20: mol_type = genomic DNA
aatgttatttttctaatatt

SEQ ID NO: 167252 - DNA, 20 bp, Homo sapiens
  source 1..20: mol_type = genomic DNA
atgttatttttctaatatta

SEQ ID NO: 167253 - DNA, 20 bp, Homo sapiens
  source 1..20: mol_type = genomic DNA
tgttatttttctaatattat

SEQ ID NO: 167254 - DNA, 20 bp, Homo sapiens
  source 1..20: mol_type = genomic DNA
gttatttttctaatattatg

SEQ ID NO: 167255 - DNA, 20 bp, Homo sapiens
  source 1..20: mol_type = genomic DNA
ttatttttctaatattatga

SEQ ID NO: 167256 - DNA, 20 bp, Homo sapiens
  source 1..20: mol_type = genomic DNA
tatttttctaatattatgag

SEQ ID NO: 167257 - DNA, 20 bp, Homo sapiens
  source 1..20: mol_type = genomic DNA
atttttctaatattatgagg

SEQ ID NO: 167258 - DNA, 20 bp, Homo sapiens
  source 1..20: mol_type = genomic DNA
tttttctaatattatgaggt

SEQ ID NO: 167259 - DNA, 20 bp, Homo sapiens
  source 1..20: mol_type = genomic DNA
ttttctaatattatgaggtt

SEQ ID NO: 167260 - DNA, 20 bp, Homo sapiens
  source 1..20: mol_type = genomic DNA
tttctaatattatgaggttc

SEQ ID NO: 167261 - DNA, 20 bp, Homo sapiens
  source 1..20: mol_type = genomic DNA
ttctaatattatgaggttct

SEQ ID NO: 167262 - DNA, 20 bp, Homo sapiens
  source 1..20: mol_type = genomic DNA
tctaatattatgaggttctt

SEQ ID NO: 167263 - DNA, 20 bp, Homo sapiens
  source 1..20: mol_type = genomic DNA
ctaatattatgaggttctta

SEQ ID NO: 167264 - DNA, 20 bp, Homo sapiens
  source 1..20: mol_type = genomic DNA
taatattatgaggttcttaa

SEQ ID NO: 167265 - DNA, 20 bp, Homo sapiens
  source 1..20: mol_type = genomic DNA
aatattatgaggttcttaaa

SEQ ID NO: 167266 - DNA, 20 bp, Homo sapiens
  source 1..20: mol_type = genomic DNA
atattatgaggttcttaaac

SEQ ID NO: 167267 - DNA, 20 bp, Homo sapiens
  source 1..20: mol_type = genomic DNA
tattatgaggttcttaaaca

SEQ ID NO: 167268 - DNA, 20 bp, Homo sapiens
  source 1..20: mol_type = genomic DNA
attatgaggttcttaaacat

SEQ ID NO: 167269 - DNA, 20 bp, Homo sapiens
  source 1..20: mol_type = genomic DNA
ttatgaggttcttaaacatc

SEQ ID NO: 167270 - DNA, 20 bp, Homo sapiens
  source 1..20: mol_type = genomic DNA
tatgaggttcttaaacatct

SEQ ID NO: 167271 - DNA, 20 bp, Homo sapiens
  source 1..20: mol_type = genomic DNA
atgaggttcttaaacatctt

SEQ ID NO: 167272 - DNA, 20 bp, Homo sapiens
  source 1..20: mol_type = genomic DNA
tgaggttcttaaacatcttt

SEQ ID NO: 167273 - DNA, 20 bp, Homo sapiens
  source 1..20: mol_type = genomic DNA
gaggttcttaaacatctttt

SEQ ID NO: 167274 - DNA, 20 bp, Homo sapiens
  source 1..20: mol_type = genomic DNA
aggttcttaaacatcttttg

SEQ ID NO: 167275 - DNA, 20 bp, Homo sapiens
  source 1..20: mol_type = genomic DNA
ggttcttaaacatcttttgg

SEQ ID NO: 167276 - DNA, 20 bp, Homo sapiens
  source 1..20: mol_type = genomic DNA
gttcttaaacatcttttggg

SEQ ID NO: 167277 - DNA, 20 bp, Homo sapiens
  source 1..20: mol_type = genomic DNA
ttcttaaacatcttttgggt

SEQ ID NO: 167278 - DNA, 20 bp, Homo sapiens
  source 1..20: mol_type = genomic DNA
tcttaaacatcttttgggta

SEQ ID NO: 167279 - DNA, 20 bp, Homo sapiens
  source 1..20: mol_type = genomic DNA
cttaaacatcttttgggtat

SEQ ID NO: 167280 - DNA, 20 bp, Homo sapiens
  source 1..20: mol_type = genomic DNA
ttaaacatcttttgggtatt

SEQ ID NO: 167281 - DNA, 20 bp, Homo sapiens
  source 1..20: mol_type = genomic DNA
taaacatcttttgggtattg

SEQ ID NO: 167282 - DNA, 20 bp, Homo sapiens
  source 1..20: mol_type = genomic DNA
aaacatcttttgggtattgt

SEQ ID NO: 167283 - DNA, 20 bp, Homo sapiens
  source 1..20: mol_type = genomic DNA
aacatcttttgggtattgtt

SEQ ID NO: 167284 - DNA, 20 bp, Homo sapiens
  source 1..20: mol_type = genomic DNA
acatcttttgggtattgttg

SEQ ID NO: 167285 - DNA, 20 bp, Homo sapiens
  source 1..20: mol_type = genomic DNA
catcttttgggtattgttgg

SEQ ID NO: 167286 - DNA, 20 bp, Homo sapiens
  source 1..20: mol_type = genomic DNA
atcttttgggtattgttggg

SEQ ID NO: 167287 - DNA, 20 bp, Homo sapiens
  source 1..20: mol_type = genomic DNA
tcttttgggtattgttggga

SEQ ID NO: 167288 - DNA, 20 bp, Homo sapiens
  source 1..20: mol_type = genomic DNA
cttttgggtattgttgggag

SEQ ID NO: 167289 - DNA, 20 bp, Homo sapiens
  source 1..20: mol_type = genomic DNA
ttttgggtattgttgggagg

SEQ ID NO: 167290 - DNA, 20 bp, Homo sapiens
  source 1..20: mol_type = genomic DNA
tttgggtattgttgggagga

SEQ ID NO: 167291 - DNA, 20 bp, Homo sapiens
  source 1..20: mol_type = genomic DNA
ttgggtattgttgggaggag

SEQ ID NO: 167292 - DNA, 20 bp, Homo sapiens
  source 1..20: mol_type = genomic DNA
tgggtattgttgggaggagg

SEQ ID NO: 167293 - DNA, 20 bp, Homo sapiens
  source 1..20: mol_type = genomic DNA
gggtattgttgggaggaggt

SEQ ID NO: 167294 - DNA, 20 bp, Homo sapiens
  source 1..20: mol_type = genomic DNA
ggtattgttgggaggaggta

SEQ ID NO: 167295 - DNA, 20 bp, Homo sapiens
  source 1..20: mol_type = genomic DNA
gtattgttgggaggaggtag

SEQ ID NO: 167296 - DNA, 20 bp, Homo sapiens
  source 1..20: mol_type = genomic DNA
tattgttgggaggaggtagt

SEQ ID NO: 167297 - DNA, 20 bp, Homo sapiens
  source 1..20: mol_type = genomic DNA
attgttgggaggaggtagtg

SEQ ID NO: 167298 - DNA, 20 bp, Homo sapiens
  source 1..20: mol_type = genomic DNA
ttgttgggaggaggtagtga

SEQ ID NO: 167299 - DNA, 20 bp, Homo sapiens
  source 1..20: mol_type = genomic DNA
tgttgggaggaggtagtgat

SEQ ID NO: 167300 - DNA, 20 bp, Homo sapiens
  source 1..20: mol_type = genomic DNA
gttgggaggaggtagtgatt

SEQ ID NO: 167301 - DNA, 20 bp, Homo sapiens
  source 1..20: mol_type = genomic DNA
ttgggaggaggtagtgatta

SEQ ID NO: 167302 - DNA, 20 bp, Homo sapiens
  source 1..20: mol_type = genomic DNA
tgggaggaggtagtgattac

SEQ ID NO: 167303 - DNA, 20 bp, Homo sapiens
  source 1..20: mol_type = genomic DNA
gggaggaggtagtgattact

SEQ ID NO: 167304 - DNA, 20 bp, Homo sapiens
  source 1..20: mol_type = genomic DNA
ggaggaggtagtgattactt

SEQ ID NO: 167305 - DNA, 20 bp, Homo sapiens
  source 1..20: mol_type = genomic DNA
gaggaggtagtgattacttg

SEQ ID NO: 167306 - DNA, 20 bp, Homo sapiens
  source 1..20: mol_type = genomic DNA
aggaggtagtgattacttga

SEQ ID NO: 167307 - DNA, 20 bp, Homo sapiens
  source 1..20: mol_type = genomic DNA
ggaggtagtgattacttgac

SEQ ID NO: 167308 - DNA, 20 bp, Homo sapiens
  source 1..20: mol_type = genomic DNA
gaggtagtgattacttgaca

SEQ ID NO: 167309 - DNA, 20 bp, Homo sapiens
  source 1..20: mol_type = genomic DNA
aggtagtgattacttgacag

SEQ ID NO: 167310 - DNA, 20 bp, Homo sapiens
  source 1..20: mol_type = genomic DNA
ggtagtgattacttgacagc

SEQ ID NO: 167311 - DNA, 20 bp, Homo sapiens
  source 1..20: mol_type = genomic DNA
gtagtgattacttgacagcc

SEQ ID NO: 167312 - DNA, 20 bp, Homo sapiens
  source 1..20: mol_type = genomic DNA
tagtgattacttgacagccc

SEQ ID NO: 167313 - DNA, 20 bp, Homo sapiens
  source 1..20: mol_type = genomic DNA
agtgattacttgacagccca

SEQ ID NO: 167314 - DNA, 20 bp, Homo sapiens
  source 1..20: mol_type = genomic DNA
gtgattacttgacagcccaa

SEQ ID NO: 167315 - DNA, 20 bp, Homo sapiens
  source 1..20: mol_type = genomic DNA
tgattacttgacagcccaaa

SEQ ID NO: 167316 - DNA, 20 bp, Homo sapiens
  source 1..20: mol_type = genomic DNA
gattacttgacagcccaaag

SEQ ID NO: 167317 - DNA, 20 bp, Homo sapiens
  source 1..20: mol_type = genomic DNA
attacttgacagcccaaagt

SEQ ID NO: 167318 - DNA, 20 bp, Homo sapiens
  source 1..20: mol_type = genomic DNA
ttacttgacagcccaaagtt

SEQ ID NO: 167319 - DNA, 20 bp, Homo sapiens
  source 1..20: mol_type = genomic DNA
tacttgacagcccaaagtta

SEQ ID NO: 167320 - DNA, 20 bp, Homo sapiens
  source 1..20: mol_type = genomic DNA
acttgacagcccaaagttat

SEQ ID NO: 167321 - DNA, 20 bp, Homo sapiens
  source 1..20: mol_type = genomic DNA
cttgacagcccaaagttatc

SEQ ID NO: 167322 - DNA, 20 bp, Homo sapiens
  source 1..20: mol_type = genomic DNA
ttgacagcccaaagttatct

SEQ ID NO: 167323 - DNA, 20 bp, Homo sapiens
  source 1..20: mol_type = genomic DNA
tgacagcccaaagttatctt

SEQ ID NO: 167324 - DNA, 20 bp, Homo sapiens
  source 1..20: mol_type = genomic DNA
gacagcccaaagttatcttc

SEQ ID NO: 167325 - DNA, 20 bp, Homo sapiens
  source 1..20: mol_type = genomic DNA
acagcccaaagttatcttct

SEQ ID NO: 167326 - DNA, 20 bp, Homo sapiens
  source 1..20: mol_type = genomic DNA
cagcccaaagttatcttctt

SEQ ID NO: 167327 - DNA, 20 bp, Homo sapiens
  source 1..20: mol_type = genomic DNA
agcccaaagttatcttctta

SEQ ID NO: 167328 - DNA, 20 bp, Homo sapiens
  source 1..20: mol_type = genomic DNA
gcccaaagttatcttcttaa

SEQ ID NO: 167329 - DNA, 20 bp, Homo sapiens
  source 1..20: mol_type = genomic DNA
cccaaagttatcttcttaaa

SEQ ID NO: 167330 - DNA, 20 bp, Homo sapiens
  source 1..20: mol_type = genomic DNA
ccaaagttatcttcttaaaa

SEQ ID NO: 167331 - DNA, 20 bp, Homo sapiens
  source 1..20: mol_type = genomic DNA
caaagttatcttcttaaaat

SEQ ID NO: 167332 - DNA, 20 bp, Homo sapiens
  source 1..20: mol_type = genomic DNA
aaagttatcttcttaaaatt

SEQ ID NO: 167333 - DNA, 20 bp, Homo sapiens
  source 1..20: mol_type = genomic DNA
aagttatcttcttaaaattt

SEQ ID NO: 167334 - DNA, 20 bp, Homo sapiens
  source 1..20: mol_type = genomic DNA
agttatcttcttaaaatttt

SEQ ID NO: 167335 - DNA, 20 bp, Homo sapiens
  source 1..20: mol_type = genomic DNA
gttatcttcttaaaattttt

SEQ ID NO: 167336 - DNA, 20 bp, Homo sapiens
  source 1..20: mol_type = genomic DNA
ttatcttcttaaaatttttt

SEQ ID NO: 167337 - DNA, 20 bp, Homo sapiens
  source 1..20: mol_type = genomic DNA
tatcttcttaaaatttttta

SEQ ID NO: 167338 - DNA, 20 bp, Homo sapiens
  source 1..20: mol_type = genomic DNA
atcttcttaaaattttttac

SEQ ID NO: 167339 - DNA, 20 bp, Homo sapiens
  source 1..20: mol_type = genomic DNA
tcttcttaaaattttttaca

SEQ ID NO: 167340 - DNA, 20 bp, Homo sapiens
  source 1..20: mol_type = genomic DNA
cttcttaaaattttttacag

SEQ ID NO: 167341 - DNA, 20 bp, Homo sapiens
  source 1..20: mol_type = genomic DNA
ttcttaaaattttttacagg

SEQ ID NO: 167342 - DNA, 20 bp, Homo sapiens
  source 1..20: mol_type = genomic DNA
tcttaaaattttttacaggt

SEQ ID NO: 167343 - DNA, 20 bp, Homo sapiens
  source 1..20: mol_type = genomic DNA
cttaaaattttttacaggtc

SEQ ID NO: 167344 - DNA, 20 bp, Homo sapiens
  source 1..20: mol_type = genomic DNA
ttaaaattttttacaggtcc

SEQ ID NO: 167345 - DNA, 20 bp, Homo sapiens
  source 1..20: mol_type = genomic DNA
taaaattttttacaggtcca

SEQ ID NO: 167346 - DNA, 20 bp, Homo sapiens
  source 1..20: mol_type = genomic DNA
aaaattttttacaggtccat

SEQ ID NO: 167347 - DNA, 20 bp, Homo sapiens
  source 1..20: mol_type = genomic DNA
aaattttttacaggtccatg

SEQ ID NO: 167348 - DNA, 20 bp, Homo sapiens
  source 1..20: mol_type = genomic DNA
aattttttacaggtccatga

SEQ ID NO: 167349 - DNA, 20 bp, Homo sapiens
  source 1..20: mol_type = genomic DNA
attttttacaggtccatgaa

SEQ ID NO: 167350 - DNA, 20 bp, Homo sapiens
  source 1..20: mol_type = genomic DNA
ttttttacaggtccatgaaa

SEQ ID NO: 167351 - DNA, 20 bp, Homo sapiens
  source 1..20: mol_type = genomic DNA
tttttacaggtccatgaaaa

SEQ ID NO: 167352 - DNA, 20 bp, Homo sapiens
  source 1..20: mol_type = genomic DNA
ttttacaggtccatgaaaaa

SEQ ID NO: 167353 - DNA, 20 bp, Homo sapiens
  source 1..20: mol_type = genomic DNA
tttacaggtccatgaaaaag

SEQ ID NO: 167354 - DNA, 20 bp, Homo sapiens
  source 1..20: mol_type = genomic DNA
ttacaggtccatgaaaaagc

SEQ ID NO: 167355 - DNA, 20 bp, Homo sapiens
  source 1..20: mol_type = genomic DNA
tacaggtccatgaaaaagca

SEQ ID NO: 167356 - DNA, 20 bp, Homo sapiens
  source 1..20: mol_type = genomic DNA
acaggtccatgaaaaagcag

SEQ ID NO: 167357 - DNA, 20 bp, Homo sapiens
  source 1..20: mol_type = genomic DNA
caggtccatgaaaaagcaga

SEQ ID NO: 167358 - DNA, 20 bp, Homo sapiens
  source 1..20: mol_type = genomic DNA
aggtccatgaaaaagcagat

SEQ ID NO: 167359 - DNA, 20 bp, Homo sapiens
  source 1..20: mol_type = genomic DNA
ggtccatgaaaaagcagatg

SEQ ID NO: 167360 - DNA, 20 bp, Homo sapiens
  source 1..20: mol_type = genomic DNA
gtccatgaaaaagcagatga

SEQ ID NO: 167361 - DNA, 20 bp, Homo sapiens
  source 1..20: mol_type = genomic DNA
tccatgaaaaagcagatgac

SEQ ID NO: 167362 - DNA, 20 bp, Homo sapiens
  source 1..20: mol_type = genomic DNA
ccatgaaaaagcagatgact

SEQ ID NO: 167363 - DNA, 20 bp, Homo sapiens
  source 1..20: mol_type = genomic DNA
catgaaaaagcagatgactt

SEQ ID NO: 167364 - DNA, 20 bp, Homo sapiens
  source 1..20: mol_type = genomic DNA
atgaaaaagcagatgacttg

SEQ ID NO: 167365 - DNA, 20 bp, Homo sapiens
  source 1..20: mol_type = genomic DNA
tgaaaaagcagatgacttgg

SEQ ID NO: 167366 - DNA, 20 bp, Homo sapiens
  source 1..20: mol_type = genomic DNA
gaaaaagcagatgacttggg

SEQ ID NO: 167367 - DNA, 20 bp, Homo sapiens
  source 1..20: mol_type = genomic DNA
aaaaagcagatgacttgggc

SEQ ID NO: 167368 - DNA, 20 bp, Homo sapiens
  source 1..20: mol_type = genomic DNA
aaaagcagatgacttgggca

SEQ ID NO: 167369 - DNA, 20 bp, Homo sapiens
  source 1..20: mol_type = genomic DNA
aaagcagatgacttgggcaa

SEQ ID NO: 167370 - DNA, 20 bp, Homo sapiens
  source 1..20: mol_type = genomic DNA
aagcagatgacttgggcaaa

SEQ ID NO: 167371 - DNA, 20 bp, Homo sapiens
  source 1..20: mol_type = genomic DNA
agcagatgacttgggcaaag

SEQ ID NO: 167372 - DNA, 20 bp, Homo sapiens
  source 1..20: mol_type = genomic DNA
gcagatgacttgggcaaagg

SEQ ID NO: 167373 - DNA, 20 bp, Homo sapiens
  source 1..20: mol_type = genomic DNA
cagatgacttgggcaaaggt

SEQ ID NO: 167374 - DNA, 20 bp, Homo sapiens
  source 1..20: mol_type = genomic DNA
agatgacttgggcaaaggtg

SEQ ID NO: 167375 - DNA, 20 bp, Homo sapiens
  source 1..20: mol_type = genomic DNA
gatgacttgggcaaaggtgg

SEQ ID NO: 167376 - DNA, 20 bp, Homo sapiens
  source 1..20: mol_type = genomic DNA
atgacttgggcaaaggtgga

SEQ ID NO: 167377 - DNA, 20 bp, Homo sapiens
  source 1..20: mol_type = genomic DNA
tgacttgggcaaaggtggaa

SEQ ID NO: 167378 - DNA, 20 bp, Homo sapiens
  source 1..20: mol_type = genomic DNA
gacttgggcaaaggtggaaa

SEQ ID NO: 167379 - DNA, 20 bp, Homo sapiens
  source 1..20: mol_type = genomic DNA
acttgggcaaaggtggaaat

SEQ ID NO: 167380 - DNA, 20 bp, Homo sapiens
  source 1..20: mol_type = genomic DNA
cttgggcaaaggtggaaatg

SEQ ID NO: 167381 - DNA, 20 bp, Homo sapiens
  source 1..20: mol_type = genomic DNA
ttgggcaaaggtggaaatga

SEQ ID NO: 167382 - DNA, 20 bp, Homo sapiens
  source 1..20: mol_type = genomic DNA
tgggcaaaggtggaaatgaa

SEQ ID NO: 167383 - DNA, 20 bp, Homo sapiens
  source 1..20: mol_type = genomic DNA
gggcaaaggtggaaatgaag

SEQ ID NO: 167384 - DNA, 20 bp, Homo sapiens
  source 1..20: mol_type = genomic DNA
ggcaaaggtggaaatgaaga

SEQ ID NO: 167385 - DNA, 20 bp, Homo sapiens
  source 1..20: mol_type = genomic DNA
gcaaaggtggaaatgaagaa

SEQ ID NO: 167386 - DNA, 20 bp, Homo sapiens
  source 1..20: mol_type = genomic DNA
caaaggtggaaatgaagaaa

SEQ ID NO: 167387 - DNA, 20 bp, Homo sapiens
  source 1..20: mol_type = genomic DNA
aaaggtggaaatgaagaaag

SEQ ID NO: 167388 - DNA, 20 bp, Homo sapiens
  source 1..20: mol_type = genomic DNA
aaggtggaaatgaagaaagt

SEQ ID NO: 167389 - DNA, 20 bp, Homo sapiens
  source 1..20: mol_type = genomic DNA
aggtggaaatgaagaaagta

SEQ ID NO: 167390 - DNA, 20 bp, Homo sapiens
  source 1..20: mol_type = genomic DNA
ggtggaaatgaagaaagtac

SEQ ID NO: 167391 - DNA, 20 bp, Homo sapiens
  source 1..20: mol_type = genomic DNA
gtggaaatgaagaaagtaca

SEQ ID NO: 167392 - DNA, 20 bp, Homo sapiens
  source 1..20: mol_type = genomic DNA
tggaaatgaagaaagtacaa

SEQ ID NO: 167393 - DNA, 20 bp, Homo sapiens
  source 1..20: mol_type = genomic DNA
ggaaatgaagaaagtacaaa

SEQ ID NO: 167394 - DNA, 20 bp, Homo sapiens
  source 1..20: mol_type = genomic DNA
gaaatgaagaaagtacaaag

SEQ ID NO: 167395 - DNA, 20 bp, Homo sapiens
  source 1..20: mol_type = genomic DNA
aaatgaagaaagtacaaaga

SEQ ID NO: 167396 - DNA, 20 bp, Homo sapiens
  source 1..20: mol_type = genomic DNA
aatgaagaaagtacaaagac

SEQ ID NO: 167397 - DNA, 20 bp, Homo sapiens
  source 1..20: mol_type = genomic DNA
atgaagaaagtacaaagaca

SEQ ID NO: 167398 - DNA, 20 bp, Homo sapiens
  source 1..20: mol_type = genomic DNA
tgaagaaagtacaaagacag

SEQ ID NO: 167399 - DNA, 20 bp, Homo sapiens
  source 1..20: mol_type = genomic DNA
gaagaaagtacaaagacagg

SEQ ID NO: 167400 - DNA, 20 bp, Homo sapiens
  source 1..20: mol_type = genomic DNA
aagaaagtacaaagacagga

SEQ ID NO: 167401 - DNA, 20 bp, Homo sapiens
  source 1..20: mol_type = genomic DNA
agaaagtacaaagacaggaa

SEQ ID NO: 167402 - DNA, 20 bp, Homo sapiens
  source 1..20: mol_type = genomic DNA
gaaagtacaaagacaggaaa

SEQ ID NO: 167403 - DNA, 20 bp, Homo sapiens
  source 1..20: mol_type = genomic DNA
aaagtacaaagacaggaaac

SEQ ID NO: 167404 - DNA, 20 bp, Homo sapiens
  source 1..20: mol_type = genomic DNA
aagtacaaagacaggaaacg

SEQ ID NO: 167405 - DNA, 20 bp, Homo sapiens
  source 1..20: mol_type = genomic DNA
agtacaaagacaggaaacgc

SEQ ID NO: 167406 - DNA, 20 bp, Homo sapiens
  source 1..20: mol_type = genomic DNA
gtacaaagacaggaaacgct

SEQ ID NO: 167407 - DNA, 20 bp, Homo sapiens
  source 1..20: mol_type = genomic DNA
tacaaagacaggaaacgctg

SEQ ID NO: 167408 - DNA, 20 bp, Homo sapiens
  source 1..20: mol_type = genomic DNA
acaaagacaggaaacgctgg

SEQ ID NO: 167409 - DNA, 20 bp, Homo sapiens
  source 1..20: mol_type = genomic DNA
caaagacaggaaacgctgga

SEQ ID NO: 167410 - DNA, 20 bp, Homo sapiens
  source 1..20: mol_type = genomic DNA
aaagacaggaaacgctggaa

SEQ ID NO: 167411 - DNA, 20 bp, Homo sapiens
  source 1..20: mol_type = genomic DNA
aagacaggaaacgctggaag

SEQ ID NO: 167412 - DNA, 20 bp, Homo sapiens
  source 1..20: mol_type = genomic DNA
agacaggaaacgctggaagt

SEQ ID NO: 167413 - DNA, 20 bp, Homo sapiens
  source 1..20: mol_type = genomic DNA
gacaggaaacgctggaagtc

SEQ ID NO: 167414 - DNA, 20 bp, Homo sapiens
  source 1..20: mol_type = genomic DNA
acaggaaacgctggaagtcg

SEQ ID NO: 167415 - DNA, 20 bp, Homo sapiens
  source 1..20: mol_type = genomic DNA
caggaaacgctggaagtcgt

SEQ ID NO: 167416 - DNA, 20 bp, Homo sapiens
  source 1..20: mol_type = genomic DNA
aggaaacgctggaagtcgtt

SEQ ID NO: 167417 - DNA, 20 bp, Homo sapiens
  source 1..20: mol_type = genomic DNA
ggaaacgctggaagtcgttt

SEQ ID NO: 167418 - DNA, 20 bp, Homo sapiens
  source 1..20: mol_type = genomic DNA
gaaacgctggaagtcgtttg

SEQ ID NO: 167419 - DNA, 20 bp, Homo sapiens
  source 1..20: mol_type = genomic DNA
aaacgctggaagtcgtttgg

SEQ ID NO: 167420 - DNA, 20 bp, Homo sapiens
  source 1..20: mol_type = genomic DNA
aacgctggaagtcgtttggc

SEQ ID NO: 167421 - DNA, 20 bp, Homo sapiens
  source 1..20: mol_type = genomic DNA
acgctggaagtcgtttggct

SEQ ID NO: 167422 - DNA, 20 bp, Homo sapiens
  source 1..20: mol_type = genomic DNA
cgctggaagtcgtttggctt

SEQ ID NO: 167423 - DNA, 20 bp, Homo sapiens
  source 1..20: mol_type = genomic DNA
gctggaagtcgtttggcttg

SEQ ID NO: 167424 - DNA, 20 bp, Homo sapiens
  source 1..20: mol_type = genomic DNA
ctggaagtcgtttggcttgt

SEQ ID NO: 167425 - DNA, 20 bp, Homo sapiens
  source 1..20: mol_type = genomic DNA
tggaagtcgtttggcttgtg

SEQ ID NO: 167426 - DNA, 20 bp, Homo sapiens
  source 1..20: mol_type = genomic DNA
ggaagtcgtttggcttgtgg

SEQ ID NO: 167427 - DNA, 20 bp, Homo sapiens
  source 1..20: mol_type = genomic DNA
gaagtcgtttggcttgtggt

SEQ ID NO: 167428 - DNA, 20 bp, Homo sapiens
  source 1..20: mol_type = genomic DNA
aagtcgtttggcttgtggtg

SEQ ID NO: 167429 - DNA, 20 bp, Homo sapiens
  source 1..20: mol_type = genomic DNA
agtcgtttggcttgtggtgt

SEQ ID NO: 167430 - DNA, 20 bp, Homo sapiens
  source 1..20: mol_type = genomic DNA
gtcgtttggcttgtggtgta

SEQ ID NO: 167431 - DNA, 20 bp, Homo sapiens
  source 1..20: mol_type = genomic DNA
tcgtttggcttgtggtgtaa

SEQ ID NO: 167432 - DNA, 20 bp, Homo sapiens
  source 1..20: mol_type = genomic DNA
cgtttggcttgtggtgtaat

SEQ ID NO: 167433 - DNA, 20 bp, Homo sapiens
  source 1..20: mol_type = genomic DNA
gtttggcttgtggtgtaatt

SEQ ID NO: 167434 - DNA, 20 bp, Homo sapiens
  source 1..20: mol_type = genomic DNA
tttggcttgtggtgtaattg

SEQ ID NO: 167435 - DNA, 20 bp, Homo sapiens
  source 1..20: mol_type = genomic DNA
ttggcttgtggtgtaattgg

SEQ ID NO: 167436 - DNA, 20 bp, Homo sapiens
  source 1..20: mol_type = genomic DNA
tggcttgtggtgtaattggg

SEQ ID NO: 167437 - DNA, 20 bp, Homo sapiens
  source 1..20: mol_type = genomic DNA
ggcttgtggtgtaattggga

SEQ ID NO: 167438 - DNA, 20 bp, Homo sapiens
  source 1..20: mol_type = genomic DNA
gcttgtggtgtaattgggat

SEQ ID NO: 167439 - DNA, 20 bp, Homo sapiens
  source 1..20: mol_type = genomic DNA
cttgtggtgtaattgggatc

SEQ ID NO: 167440 - DNA, 20 bp, Homo sapiens
  source 1..20: mol_type = genomic DNA
ttgtggtgtaattgggatcg

SEQ ID NO: 167441 - DNA, 20 bp, Homo sapiens
  source 1..20: mol_type = genomic DNA
tgtggtgtaattgggatcgc

SEQ ID NO: 167442 - DNA, 20 bp, Homo sapiens
  source 1..20: mol_type = genomic DNA
gtggtgtaattgggatcgcc

SEQ ID NO: 167443 - DNA, 20 bp, Homo sapiens
  source 1..20: mol_type = genomic DNA
tggtgtaattgggatcgccc

SEQ ID NO: 167444 - DNA, 20 bp, Homo sapiens
  source 1..20: mol_type = genomic DNA
ggtgtaattgggatcgccca

SEQ ID NO: 167445 - DNA, 20 bp, Homo sapiens
  source 1..20: mol_type = genomic DNA
gtgtaattgggatcgcccaa

SEQ ID NO: 167446 - DNA, 20 bp, Homo sapiens
  source 1..20: mol_type = genomic DNA
tgtaattgggatcgcccaat

SEQ ID NO: 167447 - DNA, 20 bp, Homo sapiens
  source 1..20: mol_type = genomic DNA
gtaattgggatcgcccaata

SEQ ID NO: 167448 - DNA, 20 bp, Homo sapiens
  source 1..20: mol_type = genomic DNA
taattgggatcgcccaataa

SEQ ID NO: 167449 - DNA, 20 bp, Homo sapiens
  source 1..20: mol_type = genomic DNA
aattgggatcgcccaataaa

SEQ ID NO: 167450 - DNA, 20 bp, Homo sapiens
  source 1..20: mol_type = genomic DNA
attgggatcgcccaataaac

SEQ ID NO: 167451 - DNA, 20 bp, Homo sapiens
  source 1..20: mol_type = genomic DNA
ttgggatcgcccaataaaca

SEQ ID NO: 167452 - DNA, 20 bp, Homo sapiens
  source 1..20: mol_type = genomic DNA
tgggatcgcccaataaacat

SEQ ID NO: 167453 - DNA, 20 bp, Homo sapiens
  source 1..20: mol_type = genomic DNA
gggatcgcccaataaacatt

SEQ ID NO: 167454 - DNA, 20 bp, Homo sapiens
  source 1..20: mol_type = genomic DNA
ggatcgcccaataaacattc

SEQ ID NO: 167455 - DNA, 20 bp, Homo sapiens
  source 1..20: mol_type = genomic DNA
gatcgcccaataaacattcc

SEQ ID NO: 167456 - DNA, 20 bp, Homo sapiens
  source 1..20: mol_type = genomic DNA
atcgcccaataaacattccc

SEQ ID NO: 167457 - DNA, 20 bp, Homo sapiens
  source 1..20: mol_type = genomic DNA
tcgcccaataaacattccct

SEQ ID NO: 167458 - DNA, 20 bp, Homo sapiens
  source 1..20: mol_type = genomic DNA
cgcccaataaacattccctt

SEQ ID NO: 167459 - DNA, 20 bp, Homo sapiens
  source 1..20: mol_type = genomic DNA
gcccaataaacattcccttg

SEQ ID NO: 167460 - DNA, 20 bp, Homo sapiens
  source 1..20: mol_type = genomic DNA
cccaataaacattcccttgg

SEQ ID NO: 167461 - DNA, 20 bp, Homo sapiens
  source 1..20: mol_type = genomic DNA
ccaataaacattcccttgga

SEQ ID NO: 167462 - DNA, 20 bp, Homo sapiens
  source 1..20: mol_type = genomic DNA
caataaacattcccttggat

SEQ ID NO: 167463 - DNA, 20 bp, Homo sapiens
  source 1..20: mol_type = genomic DNA
aataaacattcccttggatg

SEQ ID NO: 167464 - DNA, 20 bp, Homo sapiens
  source 1..20: mol_type = genomic DNA
ataaacattcccttggatgt

SEQ ID NO: 167465 - DNA, 20 bp, Homo sapiens
  source 1..20: mol_type = genomic DNA
taaacattcccttggatgta

SEQ ID NO: 167466 - DNA, 20 bp, Homo sapiens
  source 1..20: mol_type = genomic DNA
aaacattcccttggatgtag

SEQ ID NO: 167467 - DNA, 20 bp, Homo sapiens
  source 1..20: mol_type = genomic DNA
aacattcccttggatgtagt

SEQ ID NO: 167468 - DNA, 20 bp, Homo sapiens
  source 1..20: mol_type = genomic DNA
acattcccttggatgtagtc

SEQ ID NO: 167469 - DNA, 20 bp, Homo sapiens
  source 1..20: mol_type = genomic DNA
cattcccttggatgtagtct

SEQ ID NO: 167470 - DNA, 20 bp, Homo sapiens
  source 1..20: mol_type = genomic DNA
attcccttggatgtagtctg

SEQ ID NO: 167471 - DNA, 20 bp, Homo sapiens
  source 1..20: mol_type = genomic DNA
ttcccttggatgtagtctga

SEQ ID NO: 167472 - DNA, 20 bp, Homo sapiens
  source 1..20: mol_type = genomic DNA
tcccttggatgtagtctgag

SEQ ID NO: 167473 - DNA, 20 bp, Homo sapiens
  source 1..20: mol_type = genomic DNA
cccttggatgtagtctgagg

SEQ ID NO: 167474 - DNA, 20 bp, Homo sapiens
  source 1..20: mol_type = genomic DNA
ccttggatgtagtctgaggc

SEQ ID NO: 167475 - DNA, 20 bp, Homo sapiens
  source 1..20: mol_type = genomic DNA
cttggatgtagtctgaggcc

SEQ ID NO: 167476 - DNA, 20 bp, Homo sapiens
  source 1..20: mol_type = genomic DNA
ttggatgtagtctgaggccc

SEQ ID NO: 167477 - DNA, 20 bp, Homo sapiens
  source 1..20: mol_type = genomic DNA
tggatgtagtctgaggcccc

SEQ ID NO: 167478 - DNA, 20 bp, Homo sapiens
  source 1..20: mol_type = genomic DNA
ggatgtagtctgaggcccct

SEQ ID NO: 167479 - DNA, 20 bp, Homo sapiens
  source 1..20: mol_type = genomic DNA
gatgtagtctgaggcccctt

SEQ ID NO: 167480 - DNA, 20 bp, Homo sapiens
  source 1..20: mol_type = genomic DNA
atgtagtctgaggcccctta

SEQ ID NO: 167481 - DNA, 20 bp, Homo sapiens
  source 1..20: mol_type = genomic DNA
tgtagtctgaggccccttaa

SEQ ID NO: 167482 - DNA, 20 bp, Homo sapiens
  source 1..20: mol_type = genomic DNA
gtagtctgaggccccttaac

SEQ ID NO: 167483 - DNA, 20 bp, Homo sapiens
  source 1..20: mol_type = genomic DNA
tagtctgaggccccttaact

SEQ ID NO: 167484 - DNA, 20 bp, Homo sapiens
  source 1..20: mol_type = genomic DNA
agtctgaggccccttaactc

SEQ ID NO: 167485 - DNA, 20 bp, Homo sapiens
  source 1..20: mol_type = genomic DNA
gtctgaggccccttaactca

SEQ ID NO: 167486 - DNA, 20 bp, Homo sapiens
  source 1..20: mol_type = genomic DNA
tctgaggccccttaactcat

SEQ ID NO: 167487 - DNA, 20 bp, Homo sapiens
  source 1..20: mol_type = genomic DNA
ctgaggccccttaactcatc

SEQ ID NO: 167488 - DNA, 20 bp, Homo sapiens
  source 1..20: mol_type = genomic DNA
tgaggccccttaactcatct

SEQ ID NO: 167489 - DNA, 20 bp, Homo sapiens
  source 1..20: mol_type = genomic DNA
gaggccccttaactcatctg

SEQ ID NO: 167490 - DNA, 20 bp, Homo sapiens
  source 1..20: mol_type = genomic DNA
aggccccttaactcatctgt

SEQ ID NO: 167491 - DNA, 20 bp, Homo sapiens
  source 1..20: mol_type = genomic DNA
ggccccttaactcatctgtt

SEQ ID NO: 167492 - DNA, 20 bp, Homo sapiens
  source 1..20: mol_type = genomic DNA
gccccttaactcatctgtta

SEQ ID NO: 167493 - DNA, 20 bp, Homo sapiens
  source 1..20: mol_type = genomic DNA
ccccttaactcatctgttat

SEQ ID NO: 167494 - DNA, 20 bp, Homo sapiens
  source 1..20: mol_type = genomic DNA
cccttaactcatctgttatc

SEQ ID NO: 167495 - DNA, 20 bp, Homo sapiens
  source 1..20: mol_type = genomic DNA
ccttaactcatctgttatcc

SEQ ID NO: 167496 - DNA, 20 bp, Homo sapiens
  source 1..20: mol_type = genomic DNA
cttaactcatctgttatcct

SEQ ID NO: 167497 - DNA, 20 bp, Homo sapiens
  source 1..20: mol_type = genomic DNA
ttaactcatctgttatcctg

SEQ ID NO: 167498 - DNA, 20 bp, Homo sapiens
  source 1..20: mol_type = genomic DNA
taactcatctgttatcctgc

SEQ ID NO: 167499 - DNA, 20 bp, Homo sapiens
  source 1..20: mol_type = genomic DNA
aactcatctgttatcctgct

SEQ ID NO: 167500 - DNA, 20 bp, Homo sapiens
  source 1..20: mol_type = genomic DNA
actcatctgttatcctgcta

SEQ ID NO: 167501 - DNA, 20 bp, Homo sapiens
  source 1..20: mol_type = genomic DNA
ctcatctgttatcctgctag

SEQ ID NO: 167502 - DNA, 20 bp, Homo sapiens
  source 1..20: mol_type = genomic DNA
tcatctgttatcctgctagc

SEQ ID NO: 167503 - DNA, 20 bp, Homo sapiens
  source 1..20: mol_type = genomic DNA
catctgttatcctgctagct

SEQ ID NO: 167504 - DNA, 20 bp, Homo sapiens
  source 1..20: mol_type = genomic DNA
atctgttatcctgctagctg

SEQ ID NO: 167505 - DNA, 20 bp, Homo sapiens
  source 1..20: mol_type = genomic DNA
tctgttatcctgctagctgt

SEQ ID NO: 167506 - DNA, 20 bp, Homo sapiens
  source 1..20: mol_type = genomic DNA
ctgttatcctgctagctgta

SEQ ID NO: 167507 - DNA, 20 bp, Homo sapiens
  source 1..20: mol_type = genomic DNA
tgttatcctgctagctgtag

SEQ ID NO: 167508 - DNA, 20 bp, Homo sapiens
  source 1..20: mol_type = genomic DNA
gttatcctgctagctgtaga

SEQ ID NO: 167509 - DNA, 20 bp, Homo sapiens
  source 1..20: mol_type = genomic DNA
ttatcctgctagctgtagaa

SEQ ID NO: 167510 - DNA, 20 bp, Homo sapiens
  source 1..20: mol_type = genomic DNA
tatcctgctagctgtagaaa

SEQ ID NO: 167511 - DNA, 20 bp, Homo sapiens
  source 1..20: mol_type = genomic DNA
atcctgctagctgtagaaat

SEQ ID NO: 167512 - DNA, 20 bp, Homo sapiens
  source 1..20: mol_type = genomic DNA
tcctgctagctgtagaaatg

SEQ ID NO: 167513 - DNA, 20 bp, Homo sapiens
  source 1..20: mol_type = genomic DNA
cctgctagctgtagaaatgt

SEQ ID NO: 167514 - DNA, 20 bp, Homo sapiens
  source 1..20: mol_type = genomic DNA
ctgctagctgtagaaatgta

SEQ ID NO: 167515 - DNA, 20 bp, Homo sapiens
  source 1..20: mol_type = genomic DNA
tgctagctgtagaaatgtat

SEQ ID NO: 167516 - DNA, 20 bp, Homo sapiens
  source 1..20: mol_type = genomic DNA
gctagctgtagaaatgtatc

SEQ ID NO: 167517 - DNA, 20 bp, Homo sapiens
  source 1..20: mol_type = genomic DNA
ctagctgtagaaatgtatcc

SEQ ID NO: 167518 - DNA, 20 bp, Homo sapiens
  source 1..20: mol_type = genomic DNA
tagctgtagaaatgtatcct

SEQ ID NO: 167519 - DNA, 20 bp, Homo sapiens
  source 1..20: mol_type = genomic DNA
agctgtagaaatgtatcctg

SEQ ID NO: 167520 - DNA, 20 bp, Homo sapiens
  source 1..20: mol_type = genomic DNA
gctgtagaaatgtatcctga

SEQ ID NO: 167521 - DNA, 20 bp, Homo sapiens
  source 1..20: mol_type = genomic DNA
ctgtagaaatgtatcctgat

SEQ ID NO: 167522 - DNA, 20 bp, Homo sapiens
  source 1..20: mol_type = genomic DNA
tgtagaaatgtatcctgata

SEQ ID NO: 167523 - DNA, 20 bp, Homo sapiens
  source 1..20: mol_type = genomic DNA
gtagaaatgtatcctgataa

SEQ ID NO: 167524 - DNA, 20 bp, Homo sapiens
  source 1..20: mol_type = genomic DNA
tagaaatgtatcctgataaa

SEQ ID NO: 167525 - DNA, 20 bp, Homo sapiens
  source 1..20: mol_type = genomic DNA
agaaatgtatcctgataaac

SEQ ID NO: 167526 - DNA, 20 bp, Homo sapiens
  source 1..20: mol_type = genomic DNA
gaaatgtatcctgataaaca

SEQ ID NO: 167527 - DNA, 20 bp, Homo sapiens
  source 1..20: mol_type = genomic DNA
aaatgtatcctgataaacat

SEQ ID NO: 167528 - DNA, 20 bp, Homo sapiens
  source 1..20: mol_type = genomic DNA
aatgtatcctgataaacatt

SEQ ID NO: 167529 - DNA, 20 bp, Homo sapiens
  source 1..20: mol_type = genomic DNA
atgtatcctgataaacatta

SEQ ID NO: 167530 - DNA, 20 bp, Homo sapiens
  source 1..20: mol_type = genomic DNA
tgtatcctgataaacattaa

SEQ ID NO: 167531 - DNA, 20 bp, Homo sapiens
  source 1..20: mol_type = genomic DNA
gtatcctgataaacattaaa

SEQ ID NO: 167532 - DNA, 20 bp, Homo sapiens
  source 1..20: mol_type = genomic DNA
tatcctgataaacattaaac

SEQ ID NO: 167533 - DNA, 20 bp, Homo sapiens
  source 1..20: mol_type = genomic DNA
atcctgataaacattaaaca

SEQ ID NO: 167534 - DNA, 20 bp, Homo sapiens
  source 1..20: mol_type = genomic DNA
tcctgataaacattaaacac

SEQ ID NO: 167535 - DNA, 20 bp, Homo sapiens
  source 1..20: mol_type = genomic DNA
cctgataaacattaaacact

SEQ ID NO: 167536 - DNA, 20 bp, Homo sapiens
  source 1..20: mol_type = genomic DNA
ctgataaacattaaacactg

SEQ ID NO: 167537 - DNA, 20 bp, Homo sapiens
  source 1..20: mol_type = genomic DNA
tgataaacattaaacactgt

SEQ ID NO: 167538 - DNA, 20 bp, Homo sapiens
  source 1..20: mol_type = genomic DNA
gataaacattaaacactgta

SEQ ID NO: 167539 - DNA, 20 bp, Homo sapiens
  source 1..20: mol_type = genomic DNA
ataaacattaaacactgtaa

SEQ ID NO: 167540 - DNA, 20 bp, Homo sapiens
  source 1..20: mol_type = genomic DNA
taaacattaaacactgtaat

SEQ ID NO: 167541 - DNA, 20 bp, Homo sapiens
  source 1..20: mol_type = genomic DNA
aaacattaaacactgtaatc

SEQ ID NO: 167542 - DNA, 20 bp, Homo sapiens
  source 1..20: mol_type = genomic DNA
aacattaaacactgtaatct

SEQ ID NO: 167543 - DNA, 20 bp, Homo sapiens
  source 1..20: mol_type = genomic DNA
acattaaacactgtaatctt

SEQ ID NO: 167544 - DNA, 20 bp, Homo sapiens
  source 1..20: mol_type = genomic DNA
cattaaacactgtaatctta

SEQ ID NO: 167545 - DNA, 20 bp, Homo sapiens
  source 1..20: mol_type = genomic DNA
attaaacactgtaatcttaa

SEQ ID NO: 167546 - DNA, 20 bp, Homo sapiens
  source 1..20: mol_type = genomic DNA
ttaaacactgtaatcttaaa

SEQ ID NO: 167547 - DNA, 20 bp, Homo sapiens
  source 1..20: mol_type = genomic DNA
taaacactgtaatcttaaaa

SEQ ID NO: 167548 - DNA, 20 bp, Homo sapiens
  source 1..20: mol_type = genomic DNA
aaacactgtaatcttaaaag

SEQ ID NO: 167549 - DNA, 20 bp, Homo sapiens
  source 1..20: mol_type = genomic DNA
aacactgtaatcttaaaagt

SEQ ID NO: 167550 - DNA, 20 bp, Homo sapiens
  source 1..20: mol_type = genomic DNA
acactgtaatcttaaaagtg

SEQ ID NO: 167551 - DNA, 20 bp, Homo sapiens
  source 1..20: mol_type = genomic DNA
cactgtaatcttaaaagtgt

SEQ ID NO: 167552 - DNA, 20 bp, Homo sapiens
  source 1..20: mol_type = genomic DNA
actgtaatcttaaaagtgta

SEQ ID NO: 167553 - DNA, 20 bp, Homo sapiens
  source 1..20: mol_type = genomic DNA
ctgtaatcttaaaagtgtaa

SEQ ID NO: 167554 - DNA, 20 bp, Homo sapiens
  source 1..20: mol_type = genomic DNA
tgtaatcttaaaagtgtaat

SEQ ID NO: 167555 - DNA, 20 bp, Homo sapiens
  source 1..20: mol_type = genomic DNA
gtaatcttaaaagtgtaatt

SEQ ID NO: 167556 - DNA, 20 bp, Homo sapiens
  source 1..20: mol_type = genomic DNA
taatcttaaaagtgtaattg

SEQ ID NO: 167557 - DNA, 20 bp, Homo sapiens
  source 1..20: mol_type = genomic DNA
aatcttaaaagtgtaattgt

SEQ ID NO: 167558 - DNA, 20 bp, Homo sapiens
  source 1..20: mol_type = genomic DNA
atcttaaaagtgtaattgtg

SEQ ID NO: 167559 - DNA, 20 bp, Homo sapiens
  source 1..20: mol_type = genomic DNA
tcttaaaagtgtaattgtgt

SEQ ID NO: 167560 - DNA, 20 bp, Homo sapiens
  source 1..20: mol_type = genomic DNA
cttaaaagtgtaattgtgtg

SEQ ID NO: 167561 - DNA, 20 bp, Homo sapiens
  source 1..20: mol_type = genomic DNA
ttaaaagtgtaattgtgtga

SEQ ID NO: 167562 - DNA, 20 bp, Homo sapiens
  source 1..20: mol_type = genomic DNA
taaaagtgtaattgtgtgac

SEQ ID NO: 167563 - DNA, 20 bp, Homo sapiens
  source 1..20: mol_type = genomic DNA
aaaagtgtaattgtgtgact

SEQ ID NO: 167564 - DNA, 20 bp, Homo sapiens
  source 1..20: mol_type = genomic DNA
aaagtgtaattgtgtgactt

SEQ ID NO: 167565 - DNA, 20 bp, Homo sapiens
  source 1..20: mol_type = genomic DNA
aagtgtaattgtgtgacttt

SEQ ID NO: 167566 - DNA, 20 bp, Homo sapiens
  source 1..20: mol_type = genomic DNA
agtgtaattgtgtgactttt

SEQ ID NO: 167567 - DNA, 20 bp, Homo sapiens
  source 1..20: mol_type = genomic DNA
gtgtaattgtgtgacttttt

SEQ ID NO: 167568 - DNA, 20 bp, Homo sapiens
  source 1..20: mol_type = genomic DNA
tgtaattgtgtgactttttc

SEQ ID NO: 167569 - DNA, 20 bp, Homo sapiens
  source 1..20: mol_type = genomic DNA
gtaattgtgtgactttttca

SEQ ID NO: 167570 - DNA, 20 bp, Homo sapiens
  source 1..20: mol_type = genomic DNA
taattgtgtgactttttcag

SEQ ID NO: 167571 - DNA, 20 bp, Homo sapiens
  source 1..20: mol_type = genomic DNA
aattgtgtgactttttcaga

SEQ ID NO: 167572 - DNA, 20 bp, Homo sapiens
  source 1..20: mol_type = genomic DNA
attgtgtgactttttcagag

SEQ ID NO: 167573 - DNA, 20 bp, Homo sapiens
  source 1..20: mol_type = genomic DNA
ttgtgtgactttttcagagt

SEQ ID NO: 167574 - DNA, 20 bp, Homo sapiens
  source 1..20: mol_type = genomic DNA
tgtgtgactttttcagagtt

SEQ ID NO: 167575 - DNA, 20 bp, Homo sapiens
  source 1..20: mol_type = genomic DNA
gtgtgactttttcagagttg

SEQ ID NO: 167576 - DNA, 20 bp, Homo sapiens
  source 1..20: mol_type = genomic DNA
tgtgactttttcagagttgc

SEQ ID NO: 167577 - DNA, 20 bp, Homo sapiens
  source 1..20: mol_type = genomic DNA
gtgactttttcagagttgct

SEQ ID NO: 167578 - DNA, 20 bp, Homo sapiens
  source 1..20: mol_type = genomic DNA
tgactttttcagagttgctt

SEQ ID NO: 167579 - DNA, 20 bp, Homo sapiens
  source 1..20: mol_type = genomic DNA
gactttttcagagttgcttt

SEQ ID NO: 167580 - DNA, 20 bp, Homo sapiens
  source 1..20: mol_type = genomic DNA
actttttcagagttgcttta

SEQ ID NO: 167581 - DNA, 20 bp, Homo sapiens
  source 1..20: mol_type = genomic DNA
ctttttcagagttgctttaa

SEQ ID NO: 167582 - DNA, 20 bp, Homo sapiens
  source 1..20: mol_type = genomic DNA
tttttcagagttgctttaaa

SEQ ID NO: 167583 - DNA, 20 bp, Homo sapiens
  source 1..20: mol_type = genomic DNA
ttttcagagttgctttaaag

SEQ ID NO: 167584 - DNA, 20 bp, Homo sapiens
  source 1..20: mol_type = genomic DNA
tttcagagttgctttaaagt

SEQ ID NO: 167585 - DNA, 20 bp, Homo sapiens
  source 1..20: mol_type = genomic DNA
ttcagagttgctttaaagta

SEQ ID NO: 167586 - DNA, 20 bp, Homo sapiens
  source 1..20: mol_type = genomic DNA
tcagagttgctttaaagtac

SEQ ID NO: 167587 - DNA, 20 bp, Homo sapiens
  source 1..20: mol_type = genomic DNA
cagagttgctttaaagtacc

SEQ ID NO: 167588 - DNA, 20 bp, Homo sapiens
  source 1..20: mol_type = genomic DNA
agagttgctttaaagtacct

SEQ ID NO: 167589 - DNA, 20 bp, Homo sapiens
  source 1..20: mol_type = genomic DNA
gagttgctttaaagtacctg

SEQ ID NO: 167590 - DNA, 20 bp, Homo sapiens
  source 1..20: mol_type = genomic DNA
agttgctttaaagtacctgt

SEQ ID NO: 167591 - DNA, 20 bp, Homo sapiens
  source 1..20: mol_type = genomic DNA
gttgctttaaagtacctgta

SEQ ID NO: 167592 - DNA, 20 bp, Homo sapiens
  source 1..20: mol_type = genomic DNA
ttgctttaaagtacctgtag

SEQ ID NO: 167593 - DNA, 20 bp, Homo sapiens
  source 1..20: mol_type = genomic DNA
tgctttaaagtacctgtagt

SEQ ID NO: 167594 - DNA, 20 bp, Homo sapiens
  source 1..20: mol_type = genomic DNA
gctttaaagtacctgtagtg

SEQ ID NO: 167595 - DNA, 20 bp, Homo sapiens
  source 1..20: mol_type = genomic DNA
ctttaaagtacctgtagtga

SEQ ID NO: 167596 - DNA, 20 bp, Homo sapiens
  source 1..20: mol_type = genomic DNA
tttaaagtacctgtagtgag

SEQ ID NO: 167597 - DNA, 20 bp, Homo sapiens
  source 1..20: mol_type = genomic DNA
ttaaagtacctgtagtgaga

SEQ ID NO: 167598 - DNA, 20 bp, Homo sapiens
  source 1..20: mol_type = genomic DNA
taaagtacctgtagtgagaa

SEQ ID NO: 167599 - DNA, 20 bp, Homo sapiens
  source 1..20: mol_type = genomic DNA
aaagtacctgtagtgagaaa

SEQ ID NO: 167600 - DNA, 20 bp, Homo sapiens
  source 1..20: mol_type = genomic DNA
aagtacctgtagtgagaaac

SEQ ID NO: 167601 - DNA, 20 bp, Homo sapiens
  source 1..20: mol_type = genomic DNA
agtacctgtagtgagaaact

SEQ ID NO: 167602 - DNA, 20 bp, Homo sapiens
  source 1..20: mol_type = genomic DNA
gtacctgtagtgagaaactg

SEQ ID NO: 167603 - DNA, 20 bp, Homo sapiens
  source 1..20: mol_type = genomic DNA
tacctgtagtgagaaactga

SEQ ID NO: 167604 - DNA, 20 bp, Homo sapiens
  source 1..20: mol_type = genomic DNA
acctgtagtgagaaactgat

SEQ ID NO: 167605 - DNA, 20 bp, Homo sapiens
  source 1..20: mol_type = genomic DNA
cctgtagtgagaaactgatt

SEQ ID NO: 167606 - DNA, 20 bp, Homo sapiens
  source 1..20: mol_type = genomic DNA
ctgtagtgagaaactgattt

SEQ ID NO: 167607 - DNA, 20 bp, Homo sapiens
  source 1..20: mol_type = genomic DNA
tgtagtgagaaactgattta

SEQ ID NO: 167608 - DNA, 20 bp, Homo sapiens
  source 1..20: mol_type = genomic DNA
gtagtgagaaactgatttat

SEQ ID NO: 167609 - DNA, 20 bp, Homo sapiens
  source 1..20: mol_type = genomic DNA
tagtgagaaactgatttatg

SEQ ID NO: 167610 - DNA, 20 bp, Homo sapiens
  source 1..20: mol_type = genomic DNA
agtgagaaactgatttatga

SEQ ID NO: 167611 - DNA, 20 bp, Homo sapiens
  source 1..20: mol_type = genomic DNA
gtgagaaactgatttatgat

SEQ ID NO: 167612 - DNA, 20 bp, Homo sapiens
  source 1..20: mol_type = genomic DNA
tgagaaactgatttatgatc

SEQ ID NO: 167613 - DNA, 20 bp, Homo sapiens
  source 1..20: mol_type = genomic DNA
gagaaactgatttatgatca

SEQ ID NO: 167614 - DNA, 20 bp, Homo sapiens
  source 1..20: mol_type = genomic DNA
agaaactgatttatgatcac

SEQ ID NO: 167615 - DNA, 20 bp, Homo sapiens
  source 1..20: mol_type = genomic DNA
gaaactgatttatgatcact

SEQ ID NO: 167616 - DNA, 20 bp, Homo sapiens
  source 1..20: mol_type = genomic DNA
aaactgatttatgatcactt

SEQ ID NO: 167617 - DNA, 20 bp, Homo sapiens
  source 1..20: mol_type = genomic DNA
aactgatttatgatcacttg

SEQ ID NO: 167618 - DNA, 20 bp, Homo sapiens
  source 1..20: mol_type = genomic DNA
actgatttatgatcacttgg

SEQ ID NO: 167619 - DNA, 20 bp, Homo sapiens
  source 1..20: mol_type = genomic DNA
ctgatttatgatcacttgga

SEQ ID NO: 167620 - DNA, 20 bp, Homo sapiens
  source 1..20: mol_type = genomic DNA
tgatttatgatcacttggaa

SEQ ID NO: 167621 - DNA, 20 bp, Homo sapiens
  source 1..20: mol_type = genomic DNA
gatttatgatcacttggaag

SEQ ID NO: 167622 - DNA, 20 bp, Homo sapiens
  source 1..20: mol_type = genomic DNA
atttatgatcacttggaaga

SEQ ID NO: 167623 - DNA, 20 bp, Homo sapiens
  source 1..20: mol_type = genomic DNA
tttatgatcacttggaagat

SEQ ID NO: 167624 - DNA, 20 bp, Homo sapiens
  source 1..20: mol_type = genomic DNA
ttatgatcacttggaagatt

SEQ ID NO: 167625 - DNA, 20 bp, Homo sapiens
  source 1..20: mol_type = genomic DNA
tatgatcacttggaagattt

SEQ ID NO: 167626 - DNA, 20 bp, Homo sapiens
  source 1..20: mol_type = genomic DNA
atgatcacttggaagatttg

SEQ ID NO: 167627 - DNA, 20 bp, Homo sapiens
  source 1..20: mol_type = genomic DNA
tgatcacttggaagatttgt

SEQ ID NO: 167628 - DNA, 20 bp, Homo sapiens
  source 1..20: mol_type = genomic DNA
gatcacttggaagatttgta

SEQ ID NO: 167629 - DNA, 20 bp, Homo sapiens
  source 1..20: mol_type = genomic DNA
atcacttggaagatttgtat

SEQ ID NO: 167630 - DNA, 20 bp, Homo sapiens
  source 1..20: mol_type = genomic DNA
tcacttggaagatttgtata

SEQ ID NO: 167631 - DNA, 20 bp, Homo sapiens
  source 1..20: mol_type = genomic DNA
cacttggaagatttgtatag

SEQ ID NO: 167632 - DNA, 20 bp, Homo sapiens
  source 1..20: mol_type = genomic DNA
acttggaagatttgtatagt

SEQ ID NO: 167633 - DNA, 20 bp, Homo sapiens
  source 1..20: mol_type = genomic DNA
cttggaagatttgtatagtt

SEQ ID NO: 167634 - DNA, 20 bp, Homo sapiens
  source 1..20: mol_type = genomic DNA
ttggaagatttgtatagttt

SEQ ID NO: 167635 - DNA, 20 bp, Homo sapiens
  source 1..20: mol_type = genomic DNA
tggaagatttgtatagtttt

SEQ ID NO: 167636 - DNA, 20 bp, Homo sapiens
  source 1..20: mol_type = genomic DNA
ggaagatttgtatagtttta

SEQ ID NO: 167637 - DNA, 20 bp, Homo sapiens
  source 1..20: mol_type = genomic DNA
gaagatttgtatagttttat

SEQ ID NO: 167638 - DNA, 20 bp, Homo sapiens
  source 1..20: mol_type = genomic DNA
aagatttgtatagttttata

SEQ ID NO: 167639 - DNA, 20 bp, Homo sapiens
  source 1..20: mol_type = genomic DNA
agatttgtatagttttataa

SEQ ID NO: 167640 - DNA, 20 bp, Homo sapiens
  source 1..20: mol_type = genomic DNA
gatttgtatagttttataaa

SEQ ID NO: 167641 - DNA, 20 bp, Homo sapiens
  source 1..20: mol_type = genomic DNA
atttgtatagttttataaaa

SEQ ID NO: 167642 - DNA, 20 bp, Homo sapiens
  source 1..20: mol_type = genomic DNA
tttgtatagttttataaaac

SEQ ID NO: 167643 - DNA, 20 bp, Homo sapiens
  source 1..20: mol_type = genomic DNA
ttgtatagttttataaaact

SEQ ID NO: 167644 - DNA, 20 bp, Homo sapiens
  source 1..20: mol_type = genomic DNA
tgtatagttttataaaactc

SEQ ID NO: 167645 - DNA, 20 bp, Homo sapiens
  source 1..20: mol_type = genomic DNA
gtatagttttataaaactca

SEQ ID NO: 167646 - DNA, 20 bp, Homo sapiens
  source 1..20: mol_type = genomic DNA
tatagttttataaaactcag

SEQ ID NO: 167647 - DNA, 20 bp, Homo sapiens
  source 1..20: mol_type = genomic DNA
atagttttataaaactcagt

SEQ ID NO: 167648 - DNA, 20 bp, Homo sapiens
  source 1..20: mol_type = genomic DNA
tagttttataaaactcagtt

SEQ ID NO: 167649 - DNA, 20 bp, Homo sapiens
  source 1..20: mol_type = genomic DNA
agttttataaaactcagtta

SEQ ID NO: 167650 - DNA, 20 bp, Homo sapiens
  source 1..20: mol_type = genomic DNA
gttttataaaactcagttaa

SEQ ID NO: 167651 - DNA, 20 bp, Homo sapiens
  source 1..20: mol_type = genomic DNA
ttttataaaactcagttaaa

SEQ ID NO: 167652 - DNA, 20 bp, Homo sapiens
  source 1..20: mol_type = genomic DNA
tttataaaactcagttaaaa

SEQ ID NO: 167653 - DNA, 20 bp, Homo sapiens
  source 1..20: mol_type = genomic DNA
ttataaaactcagttaaaat

SEQ ID NO: 167654 - DNA, 20 bp, Homo sapiens
  source 1..20: mol_type = genomic DNA
tataaaactcagttaaaatg

SEQ ID NO: 167655 - DNA, 20 bp, Homo sapiens
  source 1..20: mol_type = genomic DNA
ataaaactcagttaaaatgt

SEQ ID NO: 167656 - DNA, 20 bp, Homo sapiens
  source 1..20: mol_type = genomic DNA
taaaactcagttaaaatgtc

SEQ ID NO: 167657 - DNA, 20 bp, Homo sapiens
  source 1..20: mol_type = genomic DNA
aaaactcagttaaaatgtct

SEQ ID NO: 167658 - DNA, 20 bp, Homo sapiens
  source 1..20: mol_type = genomic DNA
aaactcagttaaaatgtctg

SEQ ID NO: 167659 - DNA, 20 bp, Homo sapiens
  source 1..20: mol_type = genomic DNA
aactcagttaaaatgtctgt

SEQ ID NO: 167660 - DNA, 20 bp, Homo sapiens
  source 1..20: mol_type = genomic DNA
actcagttaaaatgtctgtt

SEQ ID NO: 167661 - DNA, 20 bp, Homo sapiens
  source 1..20: mol_type = genomic DNA
ctcagttaaaatgtctgttt

SEQ ID NO: 167662 - DNA, 20 bp, Homo sapiens
  source 1..20: mol_type = genomic DNA
tcagttaaaatgtctgtttc

SEQ ID NO: 167663 - DNA, 20 bp, Homo sapiens
  source 1..20: mol_type = genomic DNA
cagttaaaatgtctgtttca

SEQ ID NO: 167664 - DNA, 20 bp, Homo sapiens
  source 1..20: mol_type = genomic DNA
agttaaaatgtctgtttcaa

SEQ ID NO: 167665 - DNA, 20 bp, Homo sapiens
  source 1..20: mol_type = genomic DNA
gttaaaatgtctgtttcaat

SEQ ID NO: 167666 - DNA, 20 bp, Homo sapiens
  source 1..20: mol_type = genomic DNA
ttaaaatgtctgtttcaatg

SEQ ID NO: 167667 - DNA, 20 bp, Homo sapiens
  source 1..20: mol_type = genomic DNA
taaaatgtctgtttcaatga

SEQ ID NO: 167668 - DNA, 20 bp, Homo sapiens
  source 1..20: mol_type = genomic DNA
aaaatgtctgtttcaatgac

SEQ ID NO: 167669 - DNA, 20 bp, Homo sapiens
  source 1..20: mol_type = genomic DNA
aaatgtctgtttcaatgacc

SEQ ID NO: 167670 - DNA, 20 bp, Homo sapiens
  source 1..20: mol_type = genomic DNA
aatgtctgtttcaatgacct

SEQ ID NO: 167671 - DNA, 20 bp, Homo sapiens
  source 1..20: mol_type = genomic DNA
atgtctgtttcaatgacctg

SEQ ID NO: 167672 - DNA, 20 bp, Homo sapiens
  source 1..20: mol_type = genomic DNA
tgtctgtttcaatgacctgt

SEQ ID NO: 167673 - DNA, 20 bp, Homo sapiens
  source 1..20: mol_type = genomic DNA
gtctgtttcaatgacctgta

SEQ ID NO: 167674 - DNA, 20 bp, Homo sapiens
  source 1..20: mol_type = genomic DNA
tctgtttcaatgacctgtat

SEQ ID NO: 167675 - DNA, 20 bp, Homo sapiens
  source 1..20: mol_type = genomic DNA
ctgtttcaatgacctgtatt

SEQ ID NO: 167676 - DNA, 20 bp, Homo sapiens
  source 1..20: mol_type = genomic DNA
tgtttcaatgacctgtattt

SEQ ID NO: 167677 - DNA, 20 bp, Homo sapiens
  source 1..20: mol_type = genomic DNA
gtttcaatgacctgtatttt

SEQ ID NO: 167678 - DNA, 20 bp, Homo sapiens
  source 1..20: mol_type = genomic DNA
tttcaatgacctgtattttg

SEQ ID NO: 167679 - DNA, 20 bp, Homo sapiens
  source 1..20: mol_type = genomic DNA
ttcaatgacctgtattttgc

SEQ ID NO: 167680 - DNA, 20 bp, Homo sapiens
  source 1..20: mol_type = genomic DNA
tcaatgacctgtattttgcc

SEQ ID NO: 167681 - DNA, 20 bp, Homo sapiens
  source 1..20: mol_type = genomic DNA
caatgacctgtattttgcca

SEQ ID NO: 167682 - DNA, 20 bp, Homo sapiens
  source 1..20: mol_type = genomic DNA
aatgacctgtattttgccag

SEQ ID NO: 167683 - DNA, 20 bp, Homo sapiens
  source 1..20: mol_type = genomic DNA
atgacctgtattttgccaga

SEQ ID NO: 167684 - DNA, 20 bp, Homo sapiens
  source 1..20: mol_type = genomic DNA
tgacctgtattttgccagac

SEQ ID NO: 167685 - DNA, 20 bp, Homo sapiens
  source 1..20: mol_type = genomic DNA
gacctgtattttgccagact

SEQ ID NO: 167686 - DNA, 20 bp, Homo sapiens
  source 1..20: mol_type = genomic DNA
acctgtattttgccagactt

SEQ ID NO: 167687 - DNA, 20 bp, Homo sapiens
  source 1..20: mol_type = genomic DNA
cctgtattttgccagactta

SEQ ID NO: 167688 - DNA, 20 bp, Homo sapiens
  source 1..20: mol_type = genomic DNA
ctgtattttgccagacttaa

SEQ ID NO: 167689 - DNA, 20 bp, Homo sapiens
  source 1..20: mol_type = genomic DNA
tgtattttgccagacttaaa

SEQ ID NO: 167690 - DNA, 20 bp, Homo sapiens
  source 1..20: mol_type = genomic DNA
gtattttgccagacttaaat

SEQ ID NO: 167691 - DNA, 20 bp, Homo sapiens
  source 1..20: mol_type = genomic DNA
tattttgccagacttaaatc

SEQ ID NO: 167692 - DNA, 20 bp, Homo sapiens
  source 1..20: mol_type = genomic DNA
attttgccagacttaaatca

SEQ ID NO: 167693 - DNA, 20 bp, Homo sapiens
  source 1..20: mol_type = genomic DNA
ttttgccagacttaaatcac

SEQ ID NO: 167694 - DNA, 20 bp, Homo sapiens
  source 1..20: mol_type = genomic DNA
tttgccagacttaaatcaca

SEQ ID NO: 167695 - DNA, 20 bp, Homo sapiens
  source 1..20: mol_type = genomic DNA
ttgccagacttaaatcacag

SEQ ID NO: 167696 - DNA, 20 bp, Homo sapiens
  source 1..20: mol_type = genomic DNA
tgccagacttaaatcacaga

SEQ ID NO: 167697 - DNA, 20 bp, Homo sapiens
  source 1..20: mol_type = genomic DNA
gccagacttaaatcacagat

SEQ ID NO: 167698 - DNA, 20 bp, Homo sapiens
  source 1..20: mol_type = genomic DNA
ccagacttaaatcacagatg

SEQ ID NO: 167699 - DNA, 20 bp, Homo sapiens
  source 1..20: mol_type = genomic DNA
cagacttaaatcacagatgg

SEQ ID NO: 167700 - DNA, 20 bp, Homo sapiens
  source 1..20: mol_type = genomic DNA
agacttaaatcacagatggg

SEQ ID NO: 167701 - DNA, 20 bp, Homo sapiens
  source 1..20: mol_type = genomic DNA
gacttaaatcacagatgggt

SEQ ID NO: 167702 - DNA, 20 bp, Homo sapiens
  source 1..20: mol_type = genomic DNA
acttaaatcacagatgggta

SEQ ID NO: 167703 - DNA, 20 bp, Homo sapiens
  source 1..20: mol_type = genomic DNA
cttaaatcacagatgggtat

SEQ ID NO: 167704 - DNA, 20 bp, Homo sapiens
  source 1..20: mol_type = genomic DNA
ttaaatcacagatgggtatt

SEQ ID NO: 167705 - DNA, 20 bp, Homo sapiens
  source 1..20: mol_type = genomic DNA
taaatcacagatgggtatta

SEQ ID NO: 167706 - DNA, 20 bp, Homo sapiens
  source 1..20: mol_type = genomic DNA
aaatcacagatgggtattaa

SEQ ID NO: 167707 - DNA, 20 bp, Homo sapiens
  source 1..20: mol_type = genomic DNA
aatcacagatgggtattaaa

SEQ ID NO: 167708 - DNA, 20 bp, Homo sapiens
  source 1..20: mol_type = genomic DNA
atcacagatgggtattaaac

SEQ ID NO: 167709 - DNA, 20 bp, Homo sapiens
  source 1..20: mol_type = genomic DNA
tcacagatgggtattaaact

SEQ ID NO: 167710 - DNA, 20 bp, Homo sapiens
  source 1..20: mol_type = genomic DNA
cacagatgggtattaaactt

SEQ ID NO: 167711 - DNA, 20 bp, Homo sapiens
  source 1..20: mol_type = genomic DNA
acagatgggtattaaacttg

SEQ ID NO: 167712 - DNA, 20 bp, Homo sapiens
  source 1..20: mol_type = genomic DNA
cagatgggtattaaacttgt

SEQ ID NO: 167713 - DNA, 20 bp, Homo sapiens
  source 1..20: mol_type = genomic DNA
agatgggtattaaacttgtc

SEQ ID NO: 167714 - DNA, 20 bp, Homo sapiens
  source 1..20: mol_type = genomic DNA
gatgggtattaaacttgtca

SEQ ID NO: 167715 - DNA, 20 bp, Homo sapiens
  source 1..20: mol_type = genomic DNA
atgggtattaaacttgtcag

SEQ ID NO: 167716 - DNA, 20 bp, Homo sapiens
  source 1..20: mol_type = genomic DNA
tgggtattaaacttgtcaga

SEQ ID NO: 167717 - DNA, 20 bp, Homo sapiens
  source 1..20: mol_type = genomic DNA
gggtattaaacttgtcagaa

SEQ ID NO: 167718 - DNA, 20 bp, Homo sapiens
  source 1..20: mol_type = genomic DNA
ggtattaaacttgtcagaat

SEQ ID NO: 167719 - DNA, 20 bp, Homo sapiens
  source 1..20: mol_type = genomic DNA
gtattaaacttgtcagaatt

SEQ ID NO: 167720 - DNA, 20 bp, Homo sapiens
  source 1..20: mol_type = genomic DNA
tattaaacttgtcagaattt

SEQ ID NO: 167721 - DNA, 20 bp, Homo sapiens
  source 1..20: mol_type = genomic DNA
attaaacttgtcagaatttc

SEQ ID NO: 167722 - DNA, 20 bp, Homo sapiens
  source 1..20: mol_type = genomic DNA
ttaaacttgtcagaatttct

SEQ ID NO: 167723 - DNA, 20 bp, Homo sapiens
  source 1..20: mol_type = genomic DNA
taaacttgtcagaatttctt

SEQ ID NO: 167724 - DNA, 20 bp, Homo sapiens
  source 1..20: mol_type = genomic DNA
aaacttgtcagaatttcttt

SEQ ID NO: 167725 - DNA, 20 bp, Homo sapiens
  source 1..20: mol_type = genomic DNA
aacttgtcagaatttctttg

SEQ ID NO: 167726 - DNA, 20 bp, Homo sapiens
  source 1..20: mol_type = genomic DNA
acttgtcagaatttctttgt

SEQ ID NO: 167727 - DNA, 20 bp, Homo sapiens
  source 1..20: mol_type = genomic DNA
cttgtcagaatttctttgtc

SEQ ID NO: 167728 - DNA, 20 bp, Homo sapiens
  source 1..20: mol_type = genomic DNA
ttgtcagaatttctttgtca

SEQ ID NO: 167729 - DNA, 20 bp, Homo sapiens
  source 1..20: mol_type = genomic DNA
tgtcagaatttctttgtcat

SEQ ID NO: 167730 - DNA, 20 bp, Homo sapiens
  source 1..20: mol_type = genomic DNA
gtcagaatttctttgtcatt

SEQ ID NO: 167731 - DNA, 20 bp, Homo sapiens
  source 1..20: mol_type = genomic DNA
tcagaatttctttgtcattc

SEQ ID NO: 167732 - DNA, 20 bp, Homo sapiens
  source 1..20: mol_type = genomic DNA
cagaatttctttgtcattca

SEQ ID NO: 167733 - DNA, 20 bp, Homo sapiens
  source 1..20: mol_type = genomic DNA
agaatttctttgtcattcaa

SEQ ID NO: 167734 - DNA, 20 bp, Homo sapiens
  source 1..20: mol_type = genomic DNA
gaatttctttgtcattcaag

SEQ ID NO: 167735 - DNA, 20 bp, Homo sapiens
  source 1..20: mol_type = genomic DNA
aatttctttgtcattcaagc

SEQ ID NO: 167736 - DNA, 20 bp, Homo sapiens
  source 1..20: mol_type = genomic DNA
atttctttgtcattcaagcc

SEQ ID NO: 167737 - DNA, 20 bp, Homo sapiens
  source 1..20: mol_type = genomic DNA
tttctttgtcattcaagcct

SEQ ID NO: 167738 - DNA, 20 bp, Homo sapiens
  source 1..20: mol_type = genomic DNA
ttctttgtcattcaagcctg

SEQ ID NO: 167739 - DNA, 20 bp, Homo sapiens
  source 1..20: mol_type = genomic DNA
tctttgtcattcaagcctgt

SEQ ID NO: 167740 - DNA, 20 bp, Homo sapiens
  source 1..20: mol_type = genomic DNA
ctttgtcattcaagcctgtg

SEQ ID NO: 167741 - DNA, 20 bp, Homo sapiens
  source 1..20: mol_type = genomic DNA
tttgtcattcaagcctgtga

SEQ ID NO: 167742 - DNA, 20 bp, Homo sapiens
  source 1..20: mol_type = genomic DNA
ttgtcattcaagcctgtgaa

SEQ ID NO: 167743 - DNA, 20 bp, Homo sapiens
  source 1..20: mol_type = genomic DNA
tgtcattcaagcctgtgaat

SEQ ID NO: 167744 - DNA, 20 bp, Homo sapiens
  source 1..20: mol_type = genomic DNA
gtcattcaagcctgtgaata

SEQ ID NO: 167745 - DNA, 20 bp, Homo sapiens
  source 1..20: mol_type = genomic DNA
tcattcaagcctgtgaataa

SEQ ID NO: 167746 - DNA, 20 bp, Homo sapiens
  source 1..20: mol_type = genomic DNA
cattcaagcctgtgaataaa

SEQ ID NO: 167747 - DNA, 20 bp, Homo sapiens
  source 1..20: mol_type = genomic DNA
attcaagcctgtgaataaaa

SEQ ID NO: 167748 - DNA, 20 bp, Homo sapiens
  source 1..20: mol_type = genomic DNA
ttcaagcctgtgaataaaaa

SEQ ID NO: 167749 - DNA, 20 bp, Homo sapiens
  source 1..20: mol_type = genomic DNA
tcaagcctgtgaataaaaac

SEQ ID NO: 167750 - DNA, 20 bp, Homo sapiens
  source 1..20: mol_type = genomic DNA
caagcctgtgaataaaaacc

SEQ ID NO: 167751 - DNA, 20 bp, Homo sapiens
  source 1..20: mol_type = genomic DNA
aagcctgtgaataaaaaccc

SEQ ID NO: 167752 - DNA, 20 bp, Homo sapiens
  source 1..20: mol_type = genomic DNA
agcctgtgaataaaaaccct

SEQ ID NO: 167753 - DNA, 20 bp, Homo sapiens
  source 1..20: mol_type = genomic DNA
gcctgtgaataaaaaccctg

SEQ ID NO: 167754 - DNA, 20 bp, Homo sapiens
  source 1..20: mol_type = genomic DNA
cctgtgaataaaaaccctgt

SEQ ID NO: 167755 - DNA, 20 bp, Homo sapiens
  source 1..20: mol_type = genomic DNA
ctgtgaataaaaaccctgta

SEQ ID NO: 167756 - DNA, 20 bp, Homo sapiens
  source 1..20: mol_type = genomic DNA
tgtgaataaaaaccctgtat

SEQ ID NO: 167757 - DNA, 20 bp, Homo sapiens
  source 1..20: mol_type = genomic DNA
gtgaataaaaaccctgtatg

SEQ ID NO: 167758 - DNA, 20 bp, Homo sapiens
  source 1..20: mol_type = genomic DNA
tgaataaaaaccctgtatgg

SEQ ID NO: 167759 - DNA, 20 bp, Homo sapiens
  source 1..20: mol_type = genomic DNA
gaataaaaaccctgtatggc

SEQ ID NO: 167760 - DNA, 20 bp, Homo sapiens
  source 1..20: mol_type = genomic DNA
aataaaaaccctgtatggca

SEQ ID NO: 167761 - DNA, 20 bp, Homo sapiens
  source 1..20: mol_type = genomic DNA
ataaaaaccctgtatggcac

SEQ ID NO: 167762 - DNA, 20 bp, Homo sapiens
  source 1..20: mol_type = genomic DNA
taaaaaccctgtatggcact

SEQ ID NO: 167763 - DNA, 20 bp, Homo sapiens
  source 1..20: mol_type = genomic DNA
aaaaaccctgtatggcactt

SEQ ID NO: 167764 - DNA, 20 bp, Homo sapiens
  source 1..20: mol_type = genomic DNA
aaaaccctgtatggcactta

SEQ ID NO: 167765 - DNA, 20 bp, Homo sapiens
  source 1..20: mol_type = genomic DNA
aaaccctgtatggcacttat

SEQ ID NO: 167766 - DNA, 20 bp, Homo sapiens
  source 1..20: mol_type = genomic DNA
aaccctgtatggcacttatt

SEQ ID NO: 167767 - DNA, 20 bp, Homo sapiens
  source 1..20: mol_type = genomic DNA
accctgtatggcacttatta

SEQ ID NO: 167768 - DNA, 20 bp, Homo sapiens
  source 1..20: mol_type = genomic DNA
ccctgtatggcacttattat

SEQ ID NO: 167769 - DNA, 20 bp, Homo sapiens
  source 1..20: mol_type = genomic DNA
cctgtatggcacttattatg

SEQ ID NO: 167770 - DNA, 20 bp, Homo sapiens
  source 1..20: mol_type = genomic DNA
ctgtatggcacttattatga

SEQ ID NO: 167771 - DNA, 20 bp, Homo sapiens
  source 1..20: mol_type = genomic DNA
tgtatggcacttattatgag

SEQ ID NO: 167772 - DNA, 20 bp, Homo sapiens
  source 1..20: mol_type = genomic DNA
gtatggcacttattatgagg

SEQ ID NO: 167773 - DNA, 20 bp, Homo sapiens
  source 1..20: mol_type = genomic DNA
tatggcacttattatgaggc

SEQ ID NO: 167774 - DNA, 20 bp, Homo sapiens
  source 1..20: mol_type = genomic DNA
atggcacttattatgaggct

SEQ ID NO: 167775 - DNA, 20 bp, Homo sapiens
  source 1..20: mol_type = genomic DNA
tggcacttattatgaggcta

SEQ ID NO: 167776 - DNA, 20 bp, Homo sapiens
  source 1..20: mol_type = genomic DNA
ggcacttattatgaggctat

SEQ ID NO: 167777 - DNA, 20 bp, Homo sapiens
  source 1..20: mol_type = genomic DNA
gcacttattatgaggctatt

SEQ ID NO: 167778 - DNA, 20 bp, Homo sapiens
  source 1..20: mol_type = genomic DNA
cacttattatgaggctatta

SEQ ID NO: 167779 - DNA, 20 bp, Homo sapiens
  source 1..20: mol_type = genomic DNA
acttattatgaggctattaa

SEQ ID NO: 167780 - DNA, 20 bp, Homo sapiens
  source 1..20: mol_type = genomic DNA
cttattatgaggctattaaa

SEQ ID NO: 167781 - DNA, 20 bp, Homo sapiens
  source 1..20: mol_type = genomic DNA
ttattatgaggctattaaaa

SEQ ID NO: 167782 - DNA, 20 bp, Homo sapiens
  source 1..20: mol_type = genomic DNA
tattatgaggctattaaaag

SEQ ID NO: 167783 - DNA, 20 bp, Homo sapiens
  source 1..20: mol_type = genomic DNA
attatgaggctattaaaaga

SEQ ID NO: 167784 - DNA, 20 bp, Homo sapiens
  source 1..20: mol_type = genomic DNA
ttatgaggctattaaaagaa

SEQ ID NO: 167785 - DNA, 20 bp, Homo sapiens
  source 1..20: mol_type = genomic DNA
tatgaggctattaaaagaat

SEQ ID NO: 167786 - DNA, 20 bp, Homo sapiens
  source 1..20: mol_type = genomic DNA
atgaggctattaaaagaatc

SEQ ID NO: 167787 - DNA, 20 bp, Homo sapiens
  source 1..20: mol_type = genomic DNA
tgaggctattaaaagaatcc

SEQ ID NO: 167788 - DNA, 20 bp, Homo sapiens
  source 1..20: mol_type = genomic DNA
gaggctattaaaagaatcca

SEQ ID NO: 167789 - DNA, 20 bp, Homo sapiens
  source 1..20: mol_type = genomic DNA
aggctattaaaagaatccaa

SEQ ID NO: 167790 - DNA, 20 bp, Homo sapiens
  source 1..20: mol_type = genomic DNA
ggctattaaaagaatccaaa

SEQ ID NO: 167791 - DNA, 20 bp, Homo sapiens
  source 1..20: mol_type = genomic DNA
gctattaaaagaatccaaat

SEQ ID NO: 167792 - DNA, 20 bp, Homo sapiens
  source 1..20: mol_type = genomic DNA
ctattaaaagaatccaaatt

SEQ ID NO: 167793 - DNA, 20 bp, Homo sapiens
  source 1..20: mol_type = genomic DNA
tattaaaagaatccaaattc

SEQ ID NO: 167794 - DNA, 20 bp, Homo sapiens
  source 1..20: mol_type = genomic DNA
attaaaagaatccaaattca

SEQ ID NO: 167795 - DNA, 20 bp, Homo sapiens
  source 1..20: mol_type = genomic DNA
ttaaaagaatccaaattcaa

SEQ ID NO: 167796 - DNA, 20 bp, Homo sapiens
  source 1..20: mol_type = genomic DNA
taaaagaatccaaattcaaa

SEQ ID NO: 167797 - DNA, 20 bp, Homo sapiens
  source 1..20: mol_type = genomic DNA
aaaagaatccaaattcaaac

SEQ ID NO: 167798 - DNA, 20 bp, Homo sapiens
  source 1..20: mol_type = genomic DNA
aaagaatccaaattcaaact

SEQ ID NO: 167799 - DNA, 20 bp, Homo sapiens
  source 1..20: mol_type = genomic DNA
aagaatccaaattcaaacta

SEQ ID NO: 167800 - DNA, 20 bp, Homo sapiens
  source 1..20: mol_type = genomic DNA
agaatccaaattcaaactaa

SEQ ID NO: 167801 - DNA, 20 bp, Homo sapiens
  source 1..20: mol_type = genomic DNA
gaatccaaattcaaactaaa

SEQ ID NO: 167802 - DNA, 16310 bp, Homo sapiens
  source 1..16310: mol_type = genomic DNA
tccactgggtgacgccagctgggctcctgagtttagtggggacctgcagaacctttatgtctagctaagggattgtaaatgcaccaatcggcaccctgtgtctagctcagggtttgtgaatgcacgaatcgacactctgtatctagctactctggtggggaggtggagaacctttgtgtctagctcagggattgtaaacacaccaatcagcgccctgtcaaaacagaccactcggctctaccaatcagcaggatgtgggtggggccagataaaagaataaaagcaggctgcctgagccagcagtggcaagctgcttgggtccccttccatactgtggaagctttgtctttctttgcaataaatcttgctgctgctcactctttgggtccacactgcctttatgagctgtaacactcaccacgaaggtctgcagcttcactgctgaagccaatgagaccacgaaccccccgggaggaatgaacaacttgagacgcgctgccttaagagctgtaacactcaccgcgaaggtctgcagcttcactcctgagccagcgagaccacaaacccaccagaaggaagaaactccgaacacatctgaacatcagaaggaacaaactccggacacgccacctttaagaactgtaacactcaccgcgagggtccacggcttcattcttgaagtcagtgagaccaagaacccaccaattccggacacaccagctactagggaggctgaggtgaggggatcacctgaatccaggaagtcgagggtgcagtgagccgagatcatgccgttacactccagcctgagtgacagagtgagatcttgtgtcaaaaaaacagaacaaaataaaacaagaacgttgaataggctgtgtgttaattctgagatggagtccagacttaagaatgatcctgaggcttagacccatatccaagaggatgattccagcctggcacttataggttcttcaggcacttcagatgcaccctgtcctgaattaagccctttgtccttgaacctgctttccttggtaaacagcaccaagggggctagaaacctgggggctgcccttaccttccctctctcaccatgcacctctaatgggtggctggacttgtggttgcatttccgtgatctcccagctttcttccagtgatggccttaggtgggctcttatcctgtctcccaaatggcctctctgccttgagtctcaccccatctgctctcagtccacccactgagctattccagagaccattctgactccctgtggacacccctctggtggcttctcctctctgtcagttagaaattgcttttgactgcatgtaacaaatgtggttacgctatttaaccaaataaaggtttatttttctcgtgatgaaaagtacacagataagcagcctacttccatcgataaccattgagggtttcttatgactcttacagcaatgaaatgtgtatttacagtataaagatatacaattttaaggttttaatataattgggcctaagcacagtattttttgttttagttttcaactgcccaggtgattctattgtgcagccagggttgataaacactgcatctaggcccagtgcctttgatttgcagctgaggtctagagagaattattgaaactgcagtcccagctacttgggaggctgaggttggagaattgcctaagcccagcggggtgaggctgtagtgagtcaagactgcaccaccgcactccagcccgggcgacagagcaacactccatctaaaaaaaaaaaaatttctggtctacctttttgcccaccttttaaccacagaggtccccaaacatgaattttcactctcaggaaggctgaaatgacacattacaagcggtttagtcatctgcacgtgccgccatctgatttaaggcatctattcctcctcaccattcctgacaaagttgaactgtctacatgtgccacattctcctctttctctaattccttccctccttccctcctccctttcttccctccctccctccttccttcttctttctctttctttttctttctctctttctctttctttctctttctctctcactctcttttcttctttctgacagggtttgcctgttctgcttctttaaaccctggggttcaagtgcaaaggtccctctcatctgatttccctattttattttatttaagttagatactccacgatgatgatgatgattattgttgagacaggatttcattctgttgcccaggctggagtgcaatggtgcgatcacaactcactgcagcctcaacctcctgggcccacgcgatcctcctacctcagcctcccaagtagcttggactacaggggtgtaccaccatgcccggctaattacatgtgccagattcaacccacgttccagggttccaaacaaccaaggctctatcatcctgtcttaacaaatataccttcataaagacctggaaggcaggttgaaatgtggaattcttggacttctttcagttctacgtagaagggtagcagtggagagctggctgcctgcccgcccctggcctttcctcctttccccacccctgctccttgtggcactgggcagggcctacgttcaaggctagcagtgtactcaacaagggacagtccctgtgtggcctgttcaggatcctatacacaggctcagggctctttgggcaggaaattccaggatccgggtactcaagtggtgttctaaacagtggttcttggccgggtgtggtggctcacacctgtaatcccagcactttgggaggccgaggctggcagatcacttgaggtcaggagttcgagaccagcctggccaacatggtgaaaccccatctctactaaaaatacaaaaacttagccaggcatggtgtgcacgcctgtagtcccagctactcgggaggctgaggcaggagaatcacttgaacccagcaggcggaggttgcagtgagctgagattgcaccactgcactccagcctggtgacagagtgagactccatatcaaaataaatacataaataaataaaaacagtgattcttaactgggagtgatttggcaacgtctggaattatttttggttatcccagcctggcagggagggacagggtattactggcatctagtgagtaggggctagggattctactgaacatcctacagtgtacaggacagcctccacagcaaagaactgtctggcccaaaatgtccatagtgcccacattcgatgccctgcattaggaagatataaatactcttaaatatcacagagttaaattccttacccctgttctagcagagatgatattcttgcggggggagcatcttcttggcttcaacacattcttttctccatgggagatgatgccagaagagggacagaacagggcccagtaaagcatggggcctggggccagggacccccttgttcaggtgtgacgaccatcctacgaaggcaccacccaggcatcattagaccgtctcaaaagaagagtaattcactgtcccaaagcagctctctcgtgtctgtgggcggatcccttggcaagtttacaatgaactgaaatctgccgaacttcctggaacccaaagaaactttagccttgggcaaaggccctttggccagcatttgcactgtttatgcaaccgtttagaatatacgaattatctggagactactaccaaatacaacaggcaaaactgcaaatatgtatacttcctagaggatgataaaaaaatgtgaattgtatttctctgatagaggatgcattagagtctgagggtctaaatagcgtaaataataaataagtaaataaatcgatagtagtgtactccaaacgaggctggaatagcttctattgttgtttcacactggacttcaattaagtctcagtattttgccatactcaatattaagtactaggctggacgtggtggctcatgtctgtaatcccagcactttgggaggccgaggtgggtagatggctggcttgagctcaggagtttgaaaccagcctgggcaacatggtaaaaccccatctgtacccaaaatacaaaaatcagccaggtgtggtggcacatgcctgtggtcccaggtacttgggaggctgaggcaggaggatggcttgaacccaggaggtggaggctgcagtgagctatgatggcgccactgcactccagcctgggtgacagagcgagaccctgtctcaaaaatcaaacaaacaaccccctcgccccggacaaaagtagtttgcactattttctcatttcacaatatgtttttgaaatatttcccttgaaaggtaagtcatatttatcattcctgttgtatggaggcatcataaattatttcaccattctaccctccttgagtgttgtggcctttaggccagacaaaaacgcaggtgatgcctagaagccaactagttgccgtttggttatctgtagggttgtggccttgccaaacaggaaaaatataaaaagaataccgaattctgccaaccaaataagaaactctatactaaggactaagaaaattgcaggggaagaaaaggtaagtcccgggattgaggtgtagcgactttctataccctcagaaaactaaaaaacaagacaaaaaaatgaaaactacaaaagcatccatcttggggcgtcccaattgctgagtaacaaatgagacgctgtggccaaactcagtcataactaatgacatttctagacaaagtgacttcagattttcaaagcgtaccctgtttacatcattttgccaatttcgcgtactgcaaccggcgggccacgcccccgtgaaaagaaggttgttttctccacatttcggggttctggacgtttcccggctgcggggcggggggagtctccggcgcacgcggccccttggccccgcccccagtcattcccggccactcgcgacccgaggctgccgcagggggcgggctgagcgcgtgcgaggcgattggtttggggccagagtgggcgaggcgcggaggtctggcctataaagtagtcgcggagacggggtgctggtttgcgtcgtagtctcctgcagcgtctggggtttccgttgcagtcctcggaaccaggacctcggcgtggcctagcgagttatggcgacgaaggccgtgtgcgtgctgaagggcgacggcccagtgcagggcatcatcaatttcgagcagaaggcaagggctgggacggaggcttgtttgcgaggccgctcccacccgctcgtccccccgcgcacctttgctaggagcgggtcgcccgccaggcctcggggccgccctggtccagcgcccggtcccggcccgtgccgcccggtcggtgccttcgcccccagcggtgcggtgcccaagtgctgagtcaccgggcgggcccgggcgcggggcgtgggaccgaggccgccgcggggctgggcctgcgcgtggcgggagcgcggggagggattgccgcgggccggggaggggcgggggcgggcgtgctgccctctgtggtccttgggccgccgccgcgggtctgtcgtggtgcctggagcggctgtgctcgtcccttgcttggccgtgttctcgttcctgagggtcccgcggacaccgagtggcgcagtgccaggcccagcccggggatggcgactgcgcctgggcccgcctggtgtcttcgcatccctctccgctttccggcttcagcgctctaggtcagggagtcttcgcttttgtacagctctaaggctaggaatggtttttatatttttaaaaggctttggaaaacaaaaatacgcaacagagaccgtttgtgtgacactttgcagggaagtttgctggcctctgttctaggtcatgattgggctgcaagggcagagaaggtagccttgaacagaggtccttttcctcctcctaagctccgggagccagaggtttaactgacccttttggggatttttgagggcagtgatcttaactttgggtgcacagttagcttatttgaagatcttactaaaaatacaccagagcccaacctccgaccaattacatcaaaacctgtcctagtgcagggtgagtattgctgttttttgaaagtttccaaaagtgattttgatgtgcacctacgattgagaactgtcgtttgaggacagtgggtggagtttcgtatttggaaattagaagacctggagtttccattacaccgaattggcacttaataactgttgtcggagcatttcttaagccacattttcgtaaagtggctttaaaattgctctgccagtaggcaggttgctaagatggtcagagacaaacttctgaacgactcttgtaaaatatacagaaatattttcagaacttttatcagtaaaattacaaaacgtgttgcaaggaaggtgcttgtgataacactgtccccagaaccttagtgaagttaccaactggtggaaaattttctcttgcactcggcttaaaaatcatgagggaatatttactatacgaatgagattcagtctttaaaggggtttacagaaacgtgagaggacaggaacagttagtctgtgtaaatgtctgaaatatatgtgagggagataatgagtttagcctttttctttaataggtctccagattttctggaaaaggttctttggcatttgactccattttgctgtttcatttgtcagacttctttttgtccctctttacttctccccacataattcaccagtactagtgttttgtttttcagaccaagtctcgctctgtcgcccaggctggagtgcagtggcgcgatctcagctcactgcaacctccgcctcccaggttcaagcaattctcctgcctcagcctcccgggtagctgggactacaggcgcgcgccgccacgcctggctaattttttatattttagtagagacggcgtttcaccatgttggccaggatggtctcgatctgttgacgtcgtgatccacccgcctcggcctcccaaagtgctgggattacaggcgtgagccaccccgcccggccaccagtgctattcttaagacgcctctgaggaatcccttctccctggccattgagaatccatgcatgaacccaggttttccaccttccctgagcagcttgcatagttccttcttttaagcgcctgacttcgttttgtttggtgcccgttgtacctgagaatgagccttggatagtggagcattccagctttccagatatgcagagataatacattggctatcagctacttggcttggcctattccgtgtttaaaatcttggactctttgctagtttttacagatcagaatttttcacgtattaatccagttttcctagcttctcttgaagaatttttggagatctcttcatactgagccttcattagcccaggacagtactgctgtagcagttcatatattttttcgcttcccaggcctgtgttattcacttaagttcatagcctggtccctgcagggttgtacccgagcacagctacttagatgtcctgaatgtattaccggttaaatggaggtttcaaagaacctgctgtttttggccctgtgctcttgataacagagtgtttgagggacaactttcacatttgagtttttccaaaattaaaggttgtagaagagtcacagtatctattgtcaaaaagaaaagaatttaaaaaggcagcaattgccaggatacttcatttgagcaatgatattttccagtggaaagtcacatcttaagggttaatgccccttaactgttggccgtatttgaaaacaaaccaagctaaaaacaagagacactgacatgttgtatgacggtgtggtgtggatgttgtgtttattttagtcctgagatctagttgtaacttccttgatttctgtatgtagccacggagcaccattacctgtcaccattacctgaatggctatactgcttgctttcattttggtagagtggaaaggttacctaggtttcagtgcttgaaaagatttcagaaagcagtagtacgtctggttagactagaatcagtcctctcctgggggcagtggaatataatattttctgactgctaattaaaaatacctgtgatagccgggcgtggtggcttacgcctgtaatcccagcactttgggaggccgagacgggtggatcacgaggtcagcagatggagaccatcctggctaacacggtgaaaccccgtctctactaaaaatgcaaaaaaattagccgggtgtggtggtgggcgcctgtagtcccagctactcaggaggctgaggcaggagaatggcatgaacctgggaggcggagcttgcagtgagccgagatcatgtcactgcactccagcctgggcgacagagcgagactcgtctcaaaaaaaaaaagaaaaaaacttatgatggacacttaaaaacactcactgagtggggagtggagagcaggggtcccagggtagcctgttggacatttccagggcgactttttctttttttttttttaaagtcaagtgagtatgccatatggaaaagggtgtgcgtggagaaaaagcaaggggctccagagtgtaggatgagacatacaccttttgggttaaaaaggctgaggcaggagaatggcgtgaacccgggaggcggagcttgcagtgagctgagatcatgccactgcactccagcctgggcgacagagcgagactcttgtctcaaaataaaaaacgtttacatgtacatgtatattcaacatgtacaaatataacctattcaaaagtatttactacataaataggtacttacattacctatttactgtaatagtcaaagcctatgaagtatctaacactgatgtgtaggtactcactttgcttgccactctattaggtgctttttatgttatttaatcatgaagcctggccacagggtgcttgtgcattgagtgtgggaacaagattaccatctcccttttgaggacacaggcctagagcagttaagcagcttgctggaggttcactggctagaaagtggtcagcctgggatttggacacagatttttccactcccaagtctggctgctttttacttcactgtgaggggtaaaggtaaatcagctgttttctttgttcagaaactctctccaactttgcacttttcttaaaggaaagtaatggaccagtgaaggtgtggggaagcattaaaggactgactgaaggcctgcatggattccatgttcatgagtttggagataatacagcaggtgggtgttgtgctgtgctggtgacccatacttgttcaccctagttagataaacagtagagtagcccctaaacgttaaaacccctcaacttgtttttgtttttgagaaagggtcttgctctgtcgctcaggctggagtgcagtggcgctgtgcgatcatggctgaccttagccttgacctcccaggctccattgatcctcatgccttggcccgtagctgggactacaggtacacaccaccacgcctggctaatttttgtatttttttctagaggtggggtttcatcatgttgcccaggctggtcttgaactgctgggctcaagtggtctatcctcctcgacctcccaaagtgctgggattacatgtgtgagccactgtgcctgggaaaaccctcaacttttcttttaaaaaagaggtcaactttattgtatataagcactgtgctaaaattgcaggaactgggaccatatcctgatttttgtaataatgccagcagagtacacacaagaaaagtaactgcactagattgtgaagactggggtggacctgcttctgaaggtccagtgccctttgtcttaagatttggtgtagtgtgtctttagaaaccaaaaaaagagaagaagatcaaccttaagattagccacaaaactgggctttgatacctaggtgtggaaaagaaagggaaagagttgatgttttgtcttacagcatcattgtagaagagggtgtttttttgtttgtttgttttttgagacggagtcttactctgtggcccaggctggagtgcagtggcgcgatctcggctcactgcaagctccgcctcccgggttcatgccattctcctgcctcagccccctgagtagctgggactacaggtgcccgccaccccgcctggctaattttttgtatttttagtagagacggggtttcactgtgttagccaagatggtctctctcctgacctcgtgatccgcctgtctcagcctcccaaagtgctgggattacaggcatgagccaccgcacccagccagaagagggtgttttttaaagaaggcaaataggaaataaaaacttgggctcttaacttttgtaatgatcccaggtgtttgagctgggggttgagggtgggtgcctcgagcaaaggggctgcatttatttgcataatgccatgtaagagtagctctacaccccaaacacaggcttcttagtgggaccaaagtatgatacaaactgaagatggaatgcagaggattattggtactttggaatatgcttaaaaaaaatttttttaaagtatttttaaaaaatcaggcaacccctgaaccagagtaggttcagagaaactgccaaattttattttcttaatttgggattggaagcaagttaacagaagtttatgagttaagttgcatttagtgatcttttgccatatttgagtaataatctgatttttttgtttatagatttcttcttaaattaactttattcatcttgctaatttagtttcaaatagtgatttgtaatgatcagatttgatccatttctgtaattgctgaaattcccccgagttgctttttggctttaccgcctctggtctgggaggtgattgctctgctgcttcctgtaacttgcctgcctttctccctgtgtgggactcctgcgggtgagagcgtggctgaagacagccgtgttatgaaagggcctcctgtgctgtcgaggttgtgctctgtgaatgtcatcccctggtgcacagcagcaccttctacacaggatacagttggaatgccgccccctcgagttgtgtaaggcagcagccttggcccttgcacataagatgctgttgaatattctgcctgcaccaagtaaagggcacagatagaactgcttggcatatgttgctggggagatgagttttttgtaaagtatactacgttcttaagaatttggatcataaccatgggattttaataatagaaaaactgttgaagatcagtctggtcccttatttttacagtgaagaagccaaagcccagagaagggtgttaactttacaagtgtcagacagtagttagaacttggtggggtttttttttttttttttttgagatggagtcttgctctgttgcccaggctggagtgcagtggtgcgatctcagctcactgcaacctctgcctcccaggttcaagcgattctcctgcctcagcctactaagtagctgggactataggtgcgcaccaccacgcctagctaatttttgtattttttcagtagagacagggttttgctatgctggccaggctggtctcaaactcctgacctcagatgatccagccacctcagcttcccaaagtgctggggttccaggtgttagccaccatgcctggccatagacttgtttctgttcccttctcactgtggctgtaccaaggtgttgcttatcccagaagtcgtgatgcaggtcagcactttctccatgggaagttttagcagtgtttctttttagaatgtatttgggaactttaattcataatttagcttttttttcttcttcttataaataggctgtaccagtgcaggtcctcactttaatcctctatccagaaaacacggtgggccaaaggatgaagagaggtaacaagatgcttaactcttgtaataatggcgatagctttctggagttcatatggtatactacttgtaaatatgtgctaagataattccgtgtttcccccacctttgcttttgaacttgctgactcatctaaacccctgctcccaaatgctggaatgcttttacttcctgggcttaaaggaattgacaaatggggacacttaaaacgatttggttttgtagcatttattgaatatagaactaatacaagtgccaaaggggaactaatacaggaaatgtcatgaacagtactgtcaaccactagcaaaatcaatcatcattgtgaaacataggaagcttctgtagataaaaaaaaaaattgatactgaaaactagtcgagactccatttatatgtgtatgttttctgaaagcctttcagaaaaatattaaatttaaggacaagatttttatatcagaggccttgggacatagctttgttagctatgccagtaattaacaggcataactcagtaactgagagtttaccctttggtacttctgaaatcaggtgcagccccatctttcttcccagagcattagtgtgtagacgtgaagccttgtttgaagagctgtatttagaatgcctagctacttgtttgcaaatttgtgtctactcagtcaagttttaatttagctcatgaactaccttgatgtttagtggcatcagccctaatccatctgatgctttttcattattaggcatgttggagacttgggcaatgtgactgctgacaaagatggtgtggccgatgtgtctattgaagattctgtgatctcactctcaggagaccattgcatcattggccgcacactggtggtaagttttcataaaaggatatgcataaaacttcttctaacatacagtcatgtatcttttcactttgattgttagtcgcggtttctaaagatccagataaactgtacttgcagttcaaattaggaaaagcaattttattggacaattacggtgaaaatgaattattttatctaggtcagttaagaacactgttctgctaagatgcagtaaaaagcaggttacatttgaccatattagatctgagtttggaaaacagaagtagtctttagttttaaaatggccagattttcttgccaggattgggtttctcacttgttaaacagaacattttgttaagtttaaaacctgggatggacttaagtattcatgttcattcatgttcattcaggactgcaggttatcatgacttgtttaacttgtgggaagctgttgtcccaagttatcctggggaactgcatctggttcttgcaaaacaccaagtagacaggctctcttttacctccccttgagggcattaacattcagtagtcacttccattcagttaaccctttatttttatggtttttcttgagccatagttgtaaagcagaaaaatcatttataaaggtttgttgaacaaaattcaaaatactgttgcttaaagtattaagattttttaggattataccttacttataggcccgtcattcatttggcatgaaattttgagttttattcactttcactttcctttttttccaaagcaattaaaaaaactgccaaagtaagagtgactgcggaactaaggttactgtaacttaccatggaggattaagggtagcgtgtggtggtctacaacatagttatttgggttttagtatttcatttagacagcaacacttacctaatgtttaaaggtaatgtctttgcaacaccaagaaaaagctttgagtagtagtttctacttttaaactactaaatattagtatatctctctactaggattaatgttatttttctaatattatgaggttcttaaacatcttttgggtattgttgggaggaggtagtgattacttgacagcccaaagttatcttcttaaaattttttacaggtccatgaaaaagcagatgacttgggcaaaggtggaaatgaagaaagtacaaagacaggaaacgctggaagtcgtttggcttgtggtgtaattgggatcgcccaataaacattcccttggatgtagtctgaggccccttaactcatctgttatcctgctagctgtagaaatgtatcctgataaacattaaacactgtaatcttaaaagtgtaattgtgtgactttttcagagttgctttaaagtacctgtagtgagaaactgatttatgatcacttggaagatttgtatagttttataaaactcagttaaaatgtctgtttcaatgacctgtattttgccagacttaaatcacagatgggtattaaacttgtcagaatttctttgtcattcaagcctgtgaataaaaaccctgtatggcacttattatgaggctattaaaagaatccaaattcaaactaaattagctctgatacttatttatataaacagcttcagtggaacagatttagtaatactaacagtgatagcattttattttgaaagtgttttgagaccatcaaaatgcatactttaaaacagcaggtcttttagctaaaactaacacaactctgcttagacaaataggctgtcctttgaaagctttagggaaatgttcctgcttagtcattttagcattttgattcataaagtacctcctcattttaaaaagacattatgatgtaagagagccatttgataactttttagtgagctttgaaaggcaagttacagcctcagctagctagtaagattatctacctgccagaatggcacaaattctacattcaagggtagacgctggcacaacctacttacagattagccctttaaagcaatctgtagcattagaagatggaaccaaggaaatgtttgactgtgggttctggctgttgagaaataatttacacaccgaattagtgaaatgagtcactttctcttaatgtatttatgtacctgagagaatgcttttcaatgttaacctaactcaggtttgactaaattattcaattggaaattgtagaatattatttctgataaaccagaaataagtgaaatgctgtttgttcataaatatgtactttatcaaatgtaggagagatcatttaggagaggaaaagctaaattggaagacaaatctgtagtgtttccaaagttttaaaattatggtaaacaacagtatgttcacagtaagtggttaaaacaaccattctttaaatctcagtagagaatttttaaaaagcagtatttaacacatttccctaatgtagtttgttgcctatgtggaataactcaattagagactcacttatgccttttgaaacttcaaatataattacactaccagtttttacatgtgcatataggatggtcccaatactttaaattggaaatacaggctgtaagtccttcaagtctggatgttgggtaatcacgttttcttccagaagccatttgttaggactttaaaacttctcagtgggccagtgtaaaattaaggacaagttttataatttaaatttacagataaatataaaacaattttctctcattttctaaaggcaggaatataaggacattgccctagatatattctccccatcaaaccaaaggtcttgctgctgagtattatttaaaaaccagagtaataaagcagcttcgcctgaggatgaaggcaaagacaaagttaactgctcagcatactgaaaccaggagtttgaaaaagtaattcaaaacaacttcaaggccataaatacttggatagtgtgacatcaggtcttggcactggatttcctgcaatttcagatgaaggcttgacttggctttagatgttttcatgtgataattcttggataacctacaacgatttttcctatttaacccaccaactttaagcaaaagaaagaacgtatatgtgggggaaaagttcgtttacctctgccccgcaggggaattaaaacgctggtgaagaaaggcaacaggcaaggcttatataaggaaacagtagtaggctgcactgaagtcctcaaacacaacaaaaagctcttaggttgcaaatgttaaccttgattcttttacccttttgaaaaattcaatgggatggttggaaaaaaaaaaaaccacagacacacacacacacacacgcaaccttctaacgtaatacccaggcagtccgataatttatagtacaacgtgtaacactgggatccaacttttcacccagcaaaatctccttacaaattagggcaacatataccacaaagccaatggaaaaaaaaagaaaacctcgattgaattgcaaacacagcttttcaattgacattaaaacaactaacctttaccttatgactgagcactaaaaatcaaaagtattacatatgaaagtgagaataactacataaaatgtctattttcatcaaataa
